(19) United States
(12) Patent Application Publication
(10) Pub. No.: US 2016/0200807 A1
(43) Pub. Date: Jul. 14, 2016

(54) Anti-Myostatin Antibodies, Polypeptides Containing Variant Fc Regions, and Methods of Use

(71) Applicant: Chugai Seiyaku Kabushiki Kaisha, Tokyo (JP)

(72) Inventors: Yoshinao RUIKE, Singapore (SG); Taichi Kuramochi, Singapore (SG); Hiroyasu Muramatsu, Shizuoka (JP); Atsunori Ueyama, Shizuoka (JP); Tomoyuki Igawa, Shizuoka (JP); Hitoshi Katada, Shizuoka (JP); Yuji Hori, Shizuoka (JP)

(73) Assignee: Chugai Seiyaku Kabushiki Kaisha, Tokyo (JP)

(21) Appl. No.: 14/974,488

(22) Filed: Dec. 18, 2015

(30) Foreign Application Priority Data
Dec. 19, 2014 (JP) 2014-257636

(51) Int. Cl. C07K 16/22; G01N 33/68

(52) U.S. Cl. CPC C07K 16/22; G01N 33/6872; C07K 2317/76; C07K 2317/33; G01N 2333/495; C07K 2317/24; C07K 2317/94; A61K 2039/505

(57) ABSTRACT

The disclosure provides anti-myostatin antibodies and methods of making and using the same. Nucleic acids encoding the anti-myostatin antibodies and host cells comprising the nucleic acids are also provided. The anti-myostatin antibodies have uses that include treating a muscle wasting disease, reducing body fat accumulation, and increasing mass and strength of muscle tissue. The disclosure also provides polypeptides containing a variant Fc region and methods of making and using the same. Nucleic acids encoding the polypeptides and host cells comprising the nucleic acids are also provided. The polypeptides have uses that include suppressing the activation of immune cells; treating an immunological inflammatory disease, autoimmune disease, or viral infection; and increasing muscle mass and strength or reducing body fat accumulation.

### REFERENCE TO SEQUENCE LISTING SUBMITTED ELECTRONICALLY

[0001] The content of the electronically submitted sequence listing in ASCII text file NAME_SeqList.txt (3467.0140000 SL_ST25.txt; Size: 660,970 bytes; and Date of Creation: Dec. 18, 2015) filed with the application is herein incorporated by reference in its entirety.

### BACKGROUND

[0002] The present invention relates to anti-myostatin antibodies and methods of using the same. The present invention also relates to polypeptides containing variant Fc regions and methods of using the same. Myostatin, also referred to as growth differentiation factor-8 (GDF8), is a secreted protein and is a member of the transforming growth factor-β (TGF-β) superfamily of proteins. Members of this superfamily possess growth-regulatory and morphogenetic properties (see, e.g., Kingsley et al., Genes Dev. 8(2):133-146 (1994), Hoodless et al., Curr. Top. Microbiol. Immunol. 228:235-272 (1998), and U.S. Pat. No. 5,827,733). Myostatin is expressed primarily in the developing and adult skeletal muscle and functions as a negative regulator of muscle growth. Systemic overexpression of myostatin in adult mice leads to muscle wasting (see, e.g., Zimmers et al., Science 296(5572): 1486-1488 (2002)) while, conversely, a myostatin knockout mouse is characterized by hypertrophy and hyperplasia of the skeletal muscle resulting in two- to threefold greater muscle mass than their wild type littermates (see, e.g., McPherron et al., Nature 387(6628):83-90 (1997)).

[0003] Like other members of the TGF-β family, myostatin is synthesized as a large precursor protein containing an N-terminal propeptide domain, and a C-terminal domain considered as the active molecule (see, e.g., McPherron and Lee, Proc. Natl. Acad. Sct. USA 94(23): 12457-12461 (1997); WO 1994/021681). Two molecules of myostatin precursor are covalently linked via a single disulfide bond present in the C-terminal growth factor domain. Active mature myostatin (disulfide-bonded homodimer consisting of the C-terminal growth factor domain) is liberated from myostatin precursor through multiple steps of proteolytic processing. In the first step of the myostatin activation pathway, a peptide bond between the N-terminal propeptide domain and the C-terminal growth factor domain, Arg266-Asp267, is cleaved by a furin-type proprotein convertase in both chains of the homodimeric precursor. But the resulting three peptides (two propeptides and one mature myostatin (i.e., a disulfide-bonded homodimer consisting of the growth factor domains)) remain associated, forming a noncovalent inactive complex that is referred to as “latent myostatin.” Mature myostatin can then be liberated from latent myostatin through degradation of the propeptide. Members of the bone morphogenetic protein 1 (BMP1) family of metalloproteinases cleave a single peptide bond within the propeptide, Arg98-Asp99, with concomitant release of mature, active myostatin, a homodimer (see, e.g., Szláma et al., FEBS J 280(16):3822-3839 (2013)). Moreover, the latent myostatin can be activated in vitro by dissociating the complex with either acid or heat treatment as well (see, e.g., Lee, PloS One 3(2):e1628 (2008)).

[0004] Myostatin exerts its effects through a transmembrane serine/threonine kinase heterotetramer receptor family, activation of which enhances receptor transphosphorylation, leading to the stimulation of serine/threonine kinase activity. It has been shown that the myostatin pathway involves an active myostatin dimer binding to the activin receptor type IIB (ActRIIB) with high affinity, which then recruits and activates the transphosphorylation of the low affinity receptor, the activin-like kinase 4 (ALK4) or activin-like kinase 5 (ALK5). It has also been shown that the proteins Smad 2 and Smad 3 are subsequently activated and form complexes with Smad 4, which are then translocated to the nucleus for the activation of target gene transcription. It has been demonstrated that ActRIIB is able to mediate the influence of myostatin in vivo, as expression of a dominant negative form of ActRIIB in mice mimics myostatin gene knockout (see, e.g., Lee, Proc. Natl. Acad. Sci. USA 98(16):9306-9311 (2001)).

[0005] A number of disorders or conditions are associated with muscle wasting (i.e., loss of or functional impairment of muscle tissue), such as muscular dystrophy (MD; including Duchenne muscular dystrophy), amyotrophic lateral sclerosis (ALS), muscle atrophy, organ atrophy, frailty, congestive obstructive pulmonary disease (COPD), sarcopenia, and cachexia resulting from cancer or other disorders, as well as renal disease, cardiac failure or disease, and liver disease. Patients will benefit from an increase in muscle mass and/or muscle strength; however, there are presently limited treatments available for these disorders. Thus, due to its role as a negative regulator of skeletal muscle growth, myostatin becomes a desirable target for therapeutic or prophylactic intervention for such disorders or conditions, or for monitoring the progression of such disorders or conditions. In particular, agents that inhibit the activity of myostatin may be therapeutically beneficial.

[0006] Inhibition of myostatin expression leads to both muscle hypertrophy and hyperplasia (McPherron et al., Nature 387(6628):83-90 (1997)). Myostatin negatively regulates muscle regeneration after injury and lack of myostatin in myostatin null mice results in accelerated muscle regeneration (see, e.g., McCroskery et al., J Cell Sci. 118(15):3531-3541 (2005)). Anti-myostatin (GDF8) antibodies described in, e.g., U.S. Pat. Nos. 6,096,506, 7,261,893, 7,320,789, 7,807,159, and 7,888,486, and WO 2005/094446, WO 2007/047112, and WO 2010/070094 have been shown to bind to myostatin and inhibit myostatin activity in vitro and in vivo, including myostatin activity associated with the negative regulation of skeletal muscle mass. Myostatin-neutralizing antibodies increase body weight, skeletal muscle mass, and muscle size and strength in the skeletal muscle of wild type mice (see, e.g., Whittemore et al., Biochem. Biophys. Res. Commun. 300(4):965-971 (2003)) and the mdx mice, a model for muscular dystrophy (see, e.g., Bogdanovich et al., Nature 420(6914):418-421 (2002); Wagner., Ann. Neurol. 52(6):832-836 (2002)). However, these prior art antibodies are all specific for mature myostatin but not for latent myostatin, and the strategies described for inhibiting myostatin activity have utilized antibodies that can bind to and neutralize mature myostatin.

[0007] Antibodies are drawing attention as pharmaceuticals since they are highly stable in blood and have few side effects (see, e.g., Reichert et al., Nat. Biotechnol. 23:1073-1078 (2005) and Pavlou et al., Eur. J. Pharm. Biopharm. 59:389-396 (2005)). Almost all therapeutic antibodies currently on the market are antibodies of the human IgG1 subclass. One of the known functions of IgG class antibodies is antibody-dependent cell-mediated cytotoxicity (hereinafter denoted as ADCC activity) (see, e.g., Clark et al., Chem. Immunol. 65:88-110 (1997)). For an antibody to exhibit ADCC activity, the antibody Fc region must bind to an Fcγ receptor (hereinafter denoted as FcγR) which is an antibody-binding receptor present on the surface of effector cells such as killer cells, natural killer cells, and activated macrophages.

[0008] In humans, the FcγRIa (CD64A), FcγRIIa (CD32A), FcγRIIb (CD32B), FcγRIIIa (CD16A), and FcγRIIIb (CD16B) isoforms have been reported as the FcγR protein family, and the respective allotypes have also been reported (see, e.g., Jefferis et al., Immunol. Lett. 82:57-65 (2002)). FcγRIa, FcγRIIa, and FcγRIIIa are called activating FcγR since they have immunologically active functions, and FcγRIIb is called inhibitory FcγR since it has immunosuppressive functions (see, e.g., Smith et al., Nat. Rev. Immunol. 10:328-343 (2010)).

[0009] In the binding between the Fc region and FcγR, several amino acid residues in the antibody hinge region and CH2 domain, and a sugar chain attached to Asn at position 297 (EU numbering) bound to the CH2 domain have been shown to be important (see, e.g., Radaev et al., J. Biol. Chem. 276:16478-16483 (2001), Greenwood et al., Eur. J. Immunol. 23:1098-1104 (1993), and Morgan et al., Immunology 86:319-324 (1995)). Various variants having FcγR-binding properties, mainly antibodies with mutations introduced into these sites, have been studied so far; and Fc region variants having higher binding activities towards activating FcγR have been obtained (see, e.g., WO 2000/042072, WO 2006/019447, WO 2004/099249, and WO 2004/029207).

[0010] When an activating FcγR is cross-linked with an immune complex, it phosphorylates immunoreceptor tyrosine-based activating motifs (ITAMs) contained in the intracellular domain or FcR common γ-chain (an interaction partner), activates a signal transducer SYK, and triggers an inflammatory immune response by initiating an activation signal cascade (see, e.g., Nimmerjahn et al., Nat. Rev. Immunol. 8:34-47 (2008)).

[0011] FcγRIIb is the only FcγR expressed on B cells (see, e.g., Amigorena et al., Eur. J. Immunol. 19:1379-1385 (1989)). Interaction of the antibody Fc region with FcγRIIb has been reported to suppress the primary immune response of B cells (see, e.g., Sinclair, J. Exp. Med. 129:1183-1201 (1969)). Furthermore, it is reported that when FcγRIIb on B cells and B cell receptor (BCR) are cross-linked via an immune complex in blood, B cell activation and antibody production by B cells is suppressed (see, e.g., Heyman, Immunol. Lett. 88:157-161 (2003)). In this immunosuppressive signal transduction mediated by BCR and FcγRIIb, the immunoreceptor tyrosine-based inhibitory motif (ITIM) contained in the intracellular domain of FcγRIIb is necessary (see, e.g., Amigorena et al., Science 256:1808-1812 (1992) and Muta et al., Nature 368:70-73 (1994)). When ITIM is phosphorylated upon signaling, SH2-containing inositol polyphosphate 5-phosphatase (SHIP) is recruited, transduction of other activating FcγR signal cascades is inhibited, and inflammatory immune response is suppressed (see, e.g., Ravetch, Science 290:84-89 (2000)). Furthermore, aggregation of FcγRIIb alone has been reported to transiently suppress calcium influx due to BCR cross-linking and B cell proliferation in a BCR-independent manner without inducing apoptosis of IgM-producing B cells (see, e.g., Fournier et al., J. Immunol. 181:5350-5359 (2008)).

[0012] FcγRIIb is also expressed on dendritic cells, macrophages, activated neutrophils, mast cells, and basophils. FcγRIIb inhibits the functions of activating FcγR such as phagocytosis and release of inflammatory cytokines in these cells, and suppresses inflammatory immune responses (see, e.g., Smith et al., Nat. Rev. Immunol. 10:328-343 (2010)).

[0013] The importance of immunosuppressive functions of FcγRIIb has been elucidated so far through studies using FcγRIIb knockout mice. There are reports that in FcγRIIb knockout mice, humoral immunity is not appropriately regulated (see, e.g., J. Immunol. 163:618-622 (1999)), sensitivity towards collagen-induced arthritis (CIA) is increased (see, e.g., Yuasa et al., J. Exp. Med. 189:187-194 (1999)), lupus-like symptoms are presented, and Goodpasture's syndrome-like symptoms are presented (see, e.g., Nakamura et al., J. Exp. Med. 191:899-906 (2000)).

[0014] Additionally, regulatory inadequacy of FcγRIIb has been reported to be related to human autoimmnue diseases. For example, the relationship between genetic polymorphism in the transmembrane region and promoter region of FcγRIIb, and the frequency of development of systemic lupus erythematosus (SLE) (see, e.g., Blank, Hum. Genet. 117:220-227 (2005), Olferiev et al., J. Biol. Chem. 282:1738-1746 (2007), Chen et al., Arthritis Rheum. 54:3908-3917 (2006), Floto et al., Nat. Med. 11:1056-1058 (2005), and Li et al., J. Immunol. 176:5321-5328 (2006)), and decrease of FcγRIIb expression on the surface of B cells in SLE patients (see, e.g., Mackay et al., J. Exp. Med. 203:2157-2164 (2006) and Yang et al., J. Immunol. 178:3272-3280 (2007)) have been reported.

[0015] From mouse models and clinical findings as such, FcγRIIb is considered to play the role of controlling autoimmune diseases and inflammatory diseases through involvement in particular with B cells, and it is a promising target molecule for controlling autoimmune diseases and inflammatory diseases.

[0016] IgG1, mainly used as a commercially available therapeutic antibody, is known to bind not only to FcγRIIb, but also strongly to activating FcγR (see, e.g., Bruhns et al., Blood 113:3716-3725 (2009)). It may be possible to develop therapeutic antibodies having greater immunosuppressive properties compared with those of IgG1, by utilizing an Fc region with enhanced FcγRIIb binding, or improved FcγRIIb-binding selectivity compared with activating FcγR. For example, it has been suggested that the use of an antibody having a variable region that binds to BCR and an Fc with enhanced FcγRIIb binding may inhibit B cell activation (see, e.g., Chu et al., Mol. Immunol. 45:3926-3933 (2008)). It has been reported that crosslinking FcγRIIb on B cells and IgE bound to a B-cell receptor suppresses differentiation of B cells into plasma cells, which as a result causes suppression of IgE production; and in human PBMC-transplanted mice, human IgG and IgM concentrations are maintained whereas the human IgE concentration is decreased (see, e.g., Chu et al., J. Allergy Clin. Immunol. 129:1102-1115 (2012)). Besides IgE, it has been reported that when FcγRIIB and CD79b which is a constituent molecule of a B-cell receptor complex are cross-linked by an antibody, B cell proliferation is suppressed in vitro, and arthritis symptoms are alleviated in the collagen arthritis model (see, e.g., Veri et al., Arthritis Rheum. 62:1933-1943 (2010)).

[0017] Besides B cells, it has been reported that crosslinking of FcεRI and FcγRIIb on mast cells using molecules, in which the Fc portion of an IgG with enhanced FcγRIIb binding is fused to the Fc portion of IgE that binds to an IgE receptor FcεRI, causes phosphorylation of FcγRIIb, thereby suppressing FcεRI-dependent calcium influx. This suggests that inhibition of degranulation via FcγRIIb stimulation is possible by enhancing FcγRIIb binding (see, e.g., Cemerski et al., Immunol. Lett. 143:34-43 (2012)).

[0018] Accordingly, an antibody having an Fc with improved FcγRIIb-binding activity is suggested to be promising as a therapeutic agent for inflammatory diseases such as an autoimmune disease.

[0019] Furthermore, it has been reported that activation of macrophages and dendritic cells via Toll-like receptor 4 due to LPS stimulation is suppressed in the presence of an antibody-antigen immune complex, and this effect is also suggested to be actions of the immune complex via FcγRIIb (see, e.g., Wenink et al., J. Immunol. 183:4509-4520 (2009) and Zhang et al., J. Immunol. 182:554-562 (2009)). Therefore, use of antibodies with enhanced FcγRIIb binding is expected to enable enhancement of TLR-mediated activation signal-suppressing actions; thus such antibodies have been suggested as being promising as therapeutic agents for inflammatory diseases such as autoimmune diseases.

[0020] Additionally, mutants with enhanced FcγRIIb binding have been suggested to be promising therapeutic agents for cancer, as well as therapeutic agents for inflammatory diseases such as autoimmune diseases. So far, FcγRIIb has been found to play an important role in the agonistic activity of agonist antibodies against the anti-TNF receptor superfamily. Specifically, it has been suggested that interaction with FcγRIIb is required for the agonistic activity of antibodies against CD40, DR4, DR5, CD30, and CD137, which are included in the TNF receptor family (see, e.g., Ravetch, Science 333:1030-1034 (2011), Wilson et al., Cancer Cell 19:101-113 (2011), Kohrt et al., J. Clin. Invest. 122:1066-1075 (2012), Xu et al., J. Immunol. 171:562-568 (2003), Zhang et al., Blood 108:705-710 (2006), Chuntharapai et al., J. Immunol. 166:4891-4898 (2001) and Ravetch et al., Proc. Natl. Acad. Sci. USA 109:10966-10971 (2012)). Ravetch, Science 333:1030-1034 (2011) shows that the use of antibodies with enhanced FcγRIIb binding enhances the anti-tumor effect of anti-CD40 antibodies. Accordingly, antibodies with enhanced FcγRIIb are expected to have an effect of enhancing agonistic activity of agonist antibodies including antibodies against the anti-TNF receptor superfamily.

[0021] In addition, it has been shown that cell proliferation is suppressed when using an antibody that recognizes Kit, a type of receptor tyrosine kinase (RTK), to crosslink FcγRIIb and Kit on Kit-expressing cells. Similar effects have been reported even in cases where this Kit is constitutively activated and has mutations that cause oncogenesis (see, e.g., Cemerski et al., Immunol. Lett. 143:28-33 (2002)). Therefore, it is expected that use of antibodies with enhanced FcγRIIb binding may enhance inhibitory effects on cells expressing RTK having constitutively activated mutations.

[0022] Antibodies having an Fc with improved FcγRIIb-binding activity have been reported (see, e.g., Chu et al., Mol. Immunol. 45:3926-3933 (2008)). In this Literature, FcγRIIb-binding activity was improved by adding alterations such as S267E/L328F, G236D/S267E, and S239D/S267E to an antibody Fc region. Among them, the antibody introduced with the S267E/L328F mutation most strongly binds to FcγRIIb, and maintains the same level of binding to FcγRIa and FcγRIIa type H in which a residue at position 131 of FcγRIIa is His as that of a naturally-occurring IgG1. However, another report shows that this alteration enhances the binding to FcγRIIa type R in which a residue at position 131 of FcγRIIa is Arg several hundred times to the same level of FcγRIIb binding, which means the FcγRIIb-binding selectivity is not improved in comparison with type-R FcγRIIa (see, e.g., US Appl. Publ. No. US2009/0136485).

[0023] Only the effect of enhancing FcγRIIa binding and not the enhancement of FcγRIIb binding is considered to have influence on cells such as platelets which express FcγRIIa but do not express FcγRIIb (see, e.g., Smith et al., Nat. Rev. Immunol. 10:328-343 (2010)). For example, the group of patients who were administered bevacizumab, an antibody against VEGF, is known to have an increased risk for thromboembolism (see, e.g., Scappaticci et al., J. Natl. Cancer. Inst. 99:1232-1239 (2007)). Furthermore, thromboembolism has been observed in a similar manner in clinical development tests of antibodies against the CD40 ligand, and the clinical study was discontinued (see, e.g., Arthritis Rheum. 48:719-727 (2003)). In both cases of these antibodies, later studies using animal models and such have suggested that the administered antibodies aggregate platelets via FcγRIIa binding on the platelets, and form blood clots (see, e.g., Meyer et al., J. Thromb. Haemost. 7:171-181 (2008) and Robles-Carrillo et al., J. Immunol. 185:1577-1583 (2010)). In systemic lupus erythematosus which is an autoimmune disease, platelets are activated via an FcγRIIa-dependent mechanism, and platelet activation has been reported to correlate with the severity of symptoms (see, e.g., Duffau et al., Sci. Transl. Med. 2:47ra63 (2010)). Administering an antibody with enhanced FcγRIIa binding to such patients who already have a high risk for developing thromboembolism will increase the risk for developing thromboembolism, thus is extremely dangerous.

[0024] Furthermore, antibodies with enhanced FcγRIIa binding have been reported to enhance macrophage-mediated antibody dependent cellular phagocytosis (ADCP) (see, e.g., Richards et al, Mol. Cancer Ther. 7:2517-2527 (2008)). When antigens to be bound by the antibodies are phagocytized by macrophages, antibodies themselves are considered to be also phagocytized at the same time. When antibodies are administered as pharmaceuticals, it is supposed that peptide fragments derived from the administered antibodies are likely to be also presented as an antigen, thereby increasing the risk of production of antibodies against therapeutic antibodies (anti-therapeutic antibodies). More specifically, enhancing FcγRIIa binding will increase the risk of production of antibodies against the therapeutic antibodies, and this will remarkably decrease their value as pharmaceuticals. Furthermore, FcγRIIb on dendritic cells have been suggested to contribute to peripheral tolerance by inhibiting dendritic cell activation caused by immune complexes formed between antigens and antibodies, or by suppressing antigen presentation to T cells via activating Fey receptors (see, e.g., Desai et al., J. Immunol. 178:6217-6226 (2007)). Since FcγRIIa is also expressed on dendritic cells, when antibodies having an Fc with enhanced selective binding to FcγRIIb are used as pharmaceuticals, antigens are not readily presented by dendritic cells and such due to enhanced selective binding to FcγRIIb, and risk of anti-drug antibody production can be relatively decreased. Such antibodies may be useful in that regard as well.

[0025] More specifically, the value as pharmaceuticals will be considerably reduced when FcγRIIa binding is enhanced, which leads to increased risk of thrombus formation via platelet aggregation and increased risk of anti-therapeutic antibody production due to an increased immunogenicity.

[0026] From such a viewpoint, the aforementioned Fc variant with enhanced FcγRIIb binding shows significantly enhanced type-R FcγRIIa binding compared with that of a naturally-occurring IgG1, Therefore, its value as a pharmaceutical for patients carrying type-R FcγRIIa is considerably reduced. Types H and R of FcγRIIa are observed in Caucasians and African-Americans with approximately the same frequency (see, e.g., Salmon et al., J. Clin. Invest. 97:1348-1354 (1996) and Manger et al., Arthritis Rheum. 41:1181-1189 (1998)). Therefore, when this Fc variant was used for treatment of autoimmune diseases, the number of patients who can safely use it while enjoying its effects as a pharmaceutical will be limited.

[0027] Furthermore, in dendritic cells deficient in FcγRIIb or dendritic cells in which the interaction between FcγRIIb and the antibody Fc portion is inhibited by an anti-FcγRIIb antibody, dendritic cells have been reported to mature (see, e.g., Boruchov et al., J. Clin. Invest. 115:2914-2923 (2005) and Dhodapkar et al., Proc. Natl. Acad. Sci. USA 102:2910-2915 (2005)). This report suggests that FcγRIIb is actively suppressing maturation of dendritic cells in a steady state where inflammation and such are not taking place and activation does not take place. FcγRIIa is expressed on the dendritic cell surface in addition to FcγRIIb; therefore, even if binding to inhibitory FcγRIIb is enhanced and if binding to activating FcγR such as FcγRIIa is also enhanced, maturation of dendritic cells may be promoted as a result. More specifically, improving not only the FcγRIIb-binding activity but also the ratio of FcγRIIb-binding activity relative to FcγRIIa-binding activity is considered to be important in providing antibodies with an immunosuppressive action.

[0028] Therefore, when considering the generation of a pharmaceutical that utilizes the FcγRIIb binding-mediated immunosuppressive action, there is a need for an Fc variant that not only has enhanced FcγRIIb-binding activity, but also has binding to both FcγRIIa types H and R allotypes, which is maintained at a similar level or is weakened to a lower level than that of a naturally-occurring IgG1.

[0029] Meanwhile, cases where amino acid alterations were introduced into the Fc region to increase the FcγRIIb-binding selectivity have been reported so far (see, e.g., Armour et al., Mol. Immunol. 40:585-593 (2003)). However, all variants said to have improved FcγRIIb selectivity as reported in this literature showed decreased FcγRIIb binding compared with that of a naturally-occurring IgG1. Therefore, it is considered to be difficult for these variants to actually induce an FcγRIIb-mediated immunosuppressive reaction more strongly than IgG1.

[0030] Furthermore, since FcγRIIb plays an important role in the agonist antibodies mentioned above, enhancing their binding activity is expected to enhance the agonistic activity. However, when FcγRIIa binding is similarly enhanced, unintended activities such as ADCC activity and ADCP activity will be exhibited, and this may cause side effects. Also from such viewpoint, it is preferable to be able to selectively enhance FcγRIIb-binding activity.

[0031] From these results, in producing therapeutic antibodies to be used for treating autoimmune diseases and cancer utilizing FcγRIIb, it is important that compared with those of a naturally-occurring IgG, the activities of binding to both FcγRIIa allotypes are maintained or decreased, and FcγRIIb binding is enhanced. However, FcγRIIb shares 93% sequence identity in the extracellular region with that of FcγRIIa which is one of the activating FcγRs, and they are very similar structurally. There are allotypes of FcγRIIa, H type and R type, in which the amino acid at position 131 is His (type H) or Arg (type R), and yet each of them reacts differently with the antibodies (see, e.g., Warmerdam et al., J. Exp. Med. 172:19-25 (1990)). Therefore, the difficult problem may be producing an Fc region variant with enhanced selective FcγRIIb binding as compared to each allotype of FcγRIIa, which involves distinguishing highly homologous sequences between FcγRIIa and FcγRIIb. In spite of those difficulties, several Fc region variants have been identified so far, which has selective binding activity to FcγRIIb as compared to FcγRIIa, by conducting comprehensive amino acid modification analysis in the Fc region (see, e.g., WO 2012/115241, WO 2013/047752, WO 2013/125667, WO 2014/030728 and WO 2014/163101).

[0032] There has been a report on an Fc region variant with binding selectivity for FcγRIIb in relation to human FcγR so far, whereas there has been no report on an Fc region variant with binding selectivity for FcγRIIb in relation to monkey FcγR. Owing to the absence of such an Fc variant, the effects of the Fc variant selectively binding to FcγRIIb have not been thoroughly tested yet in monkey.

[0033] Apart from the above, it is reported that by modifying the charge of amino acid residues which may be exposed on the surface of an antibody so as to increase or decrease the isoelectric point (pI) of the antibody, it is possible to regulate the half-life of the antibody in blood (see, e.g., WO 2007/114319 and WO 2009/041643). They show that it is possible to prolong the plasma half-life of an antibody by reducing the antibody's pI and vice versa.

[0034] Further, it is reported that incorporation of an antigen into cells can be promoted by modifying the charge of specified amino acid residues particularly in its CH3 domain to increase the antibody's pI (see, e.g., WO 2014/145159). Also, it has been reported that modifying the charge of amino acid residues in the constant region (mainly CH1 domain) of an antibody to reduce pI can prolong the half-life of the antibody in plasma (see, e.g., WO 2012/016227).

### BRIEF SUMMARY

[0035] The invention provides anti-myostatin antibodies and methods of using the same. The invention also provides proteins containing a variant Fc region and methods of using the same.

[0036] In some embodiments, an isolated anti-myostatin antibody of the present invention binds to latent myostatin. In further embodiments, the antibody binds to an epitope within a fragment consisting of amino acids 21-100 of myostatin propeptide (SEQ ID NO: 78). In some embodiments, an isolated anti-myostatin antibody of the present invention inhibits activation of myostatin. In further embodiments, the antibody blocks the release of mature myostatin from latent myostatin. In further embodiments, the antibody blocks the proteolytic release of mature myostatin. In further embodiments, the antibody blocks the spontaneous release of mature myostatin. In further embodiments, the antibody does not bind to mature myostatin. In further embodiments, the antibody binds to the same epitope as an antibody described in Table 13. In further embodiments, the antibody binds to the same epitope as an antibody comprising a VH and a VL pair described in Table 13. In further embodiments, the antibody binds to the same epitope as an antibody described in Table 2a. In further embodiments, the antibody binds to the same epitope as an antibody comprising a VH and a VL pair described in Table 2a. In further embodiments, the antibody binds to the same epitope as an antibody described in Table 11a. In further embodiments, the antibody binds to the same epitope as an antibody comprising a VH and a VL pair described in Table 11a. In further embodiments, the antibody binds to the same epitope as an antibody described in Table 2a, 11a, or 13. In further embodiments, the antibody binds to the same epitope as an antibody comprising a VH and a VL pair described in Table 2a, 11a, or 13. In additional embodiments, the anti-myostatin antibody incorporate an Fc variant region provided herein, In further embodiments the anti-myostatin antibody comprises the amino acid sequence of an Fc variant region described in Section 8 below. In further embodiments the anti-myostatin antibody comprises the amino acid sequence of SEQ ID NO: 229-380, or 381.

[0037] In some embodiments, an isolated anti-myostatin antibody of the present invention binds to latent myostatin with higher affinity at neutral pH than at acidic pH. In some embodiments, the anti-myostatin antibody binds to latent myostatin with higher affinity at pH7.4 than at pH5.8. In some embodiments, an isolated anti-myostatin antibody of the present invention binds to a polypeptide fragment consisting of amino acids 21-100 of myostatin propeptide (SEQ ID NO: 78) with higher affinity at pH7.4 than at pH5.8. In some embodiments, the antibody binds to the same myostatin epitope as an antibody described in Table 13 with a higher affinity at neutral pH than at acidic pH. In additional embodiments, an anti-myostatin antibody binds to the same epitope as an antibody described in Table 13 with a higher affinity at pH7.4 than at pH5.8. In further embodiments, the antibody binds to the same epitope as an antibody comprising a VH and a VL pair described in Table 13 with a higher affinity at pH7.4 than at pH5.8. In some embodiments, the antibody binds to the same myostatin epitope as an antibody described in Table 2a with a higher affinity at neutral pH than at acidic pH. In some embodiments, the antibody binds to the same myostatin epitope as an antibody described in Table 2a with a higher affinity at pH7.4 than at pH5.8. In further embodiments, the antibody binds to the same epitope as an antibody comprising a VH and a VL pair described in Table 2a with a higher affinity at pH7.4 than at pH5.8. In additional embodiments, an anti-myostatin antibody binds to the same epitope as an antibody described in Table 11a with a higher affinity at neutral pH than at acidic pH. In further embodiments, the antibody binds to the same myostatin epitope as an antibody described in Table 11a with a higher affinity at pH7.4 than at pH5.8. In further embodiments, the antibody binds to the same epitope as an antibody comprising a VH and a VL pair described in Table 11a with a higher affinity at pH7.4 than at pH5.8. In additional embodiments, an anti-myostatin antibody binds to the same epitope as an antibody described in Table 2a, 11a, or 13 with a higher affinity at neutral pH than at acidic pH. In further embodiments, the antibody binds to the same myostatin epitope as an antibody described in Table 2a, 11a, or 13 with a higher affinity at pH7.4 than at pH5.8. In further embodiments, the antibody binds to the same epitope as an antibody comprising a VH and a VL pair described in Table 2a, 11a, or 13 with a higher affinity at pH7.4 than at pH5.8.

[0038] In some embodiments, an isolated anti-myostatin antibody of the present invention competes for binding latent myostatin with an antibody provided herein. In some embodiments, an isolated anti-myostatin antibody of the present invention competes for binding latent myostatin with an antibody described in Table 13. In some embodiments, an isolated anti-myostatin antibody of the present invention competes for binding latent myostatin with an antibody comprising a VH and VL pair described in Table 13. In some embodiments, the antibody competes for binding latent myostatin with an antibody described in Table 2a. In some embodiments, an isolated anti-myostatin antibody of the present invention competes for binding latent myostatin with an antibody comprising a VH and VL pair described in Table 2a. In some embodiments, the antibody competes for binding latent myostatin with an antibody described in Table 11a. In some embodiments, an isolated anti-myostatin antibody of the present invention competes for binding latent myostatin with an antibody comprising a VH and VL pair described in Table 11a. In additional embodiments, an anti-myostatin antibody competes for binding latent myostatin with an antibody described in Table 2a, 11a, or 13. In additional embodiments, an anti-myostatin antibody competes for binding latent myostatin with an antibody comprising a VH and VL pair described in Table 2a, 11a, or 13. In further embodiments, the anti-myostatin antibody binds to latent myostatin with a higher affinity at neutral pH than at acidic pH. In further embodiments, the anti-myostatin antibody binds to latent myostatin with a higher affinity at pH7.4 than at pH5.8. In further embodiments, the anti-myostatin antibody binds to a polypeptide fragment consisting of amino acids 21-100 of myostatin propeptide (SEQ ID NO: 78) with higher affinity at pH7.4 than at pH5.8. Methods for assessing the ability of an antibody to compete with a reference antibody for binding latent myostatin are described herein and known in the art.

[0039] In some embodiments, an isolated anti-myostatin antibody of the present invention is a monoclonal antibody. In some embodiments, an isolated anti-myostatin antibody of the present invention is a human, humanized, or chimeric antibody. In some embodiments, an isolated anti-myostatin antibody of the present invention is an antibody fragment that binds to myostatin. In some embodiments, an isolated anti-myostatin antibody of the present invention is an antibody fragment that binds to latent myostatin. In some embodiments, an isolated anti-myostatin antibody of the present invention is an antibody fragment that binds to a polypeptide fragment consisting of amino acids 21-100 of myostatin propeptide (SEQ ID NO: 78). In some embodiments, an isolated anti-myostatin antibody of the present invention is a full length IgG antibody.

[0040] In some embodiments, a anti-myostatin antibody of the invention comprises:

(a) (i) a HVR-H3 comprising the amino acid sequence GVPAX₁SX₂GGDX₃, wherein X₁ is Y or H, X₂ is T or H, X₃ is L or K (SEQ ID NO: 128), (ii) a HVR-L3 comprising the amino acid sequence AGGYGGGX₁YA, wherein X₁ is L or R (SEQ ID NO: 131), and (iii) a HVR-H2 comprising the amino acid sequence IISX₁ΛGX₂X₃YX₄X₅X₆WΛKX₇, wherein X₁ is Y or H, X₂ is S or K, X₃ is T, M or K, X₄ is Y or K, X₅ is A, M or E, X₆ is S or E, X₇ is G or K (SEQ ID NO: 127);
(b) (i) a HVR-HI comprising the amino acid sequence X₁X₂DIS, wherein X₁ is S or H, X₂ is Y, T, D or E (SEQ ID NO: 126), (ii) a HVR-H2 comprising the amino acid sequence IISX₁AGX₂X₃YX₄X₅X₆WAKX₇, wherein X₁ is Y or H, X₂ is S or K, X₃ is T, M or K, X₄ is Y or K, X₅ is A, M or E, X₆ is S or E, X₇ is G or K (SEQ ID NO: 127), and (iii) a HVR-H3 comprising the amino acid sequence GVPAX₁SX₂GGDX₃, wherein X₁ is Y or H, X₂ is T or H, X₃ is L or K (SEQ ID NO: 128);
(c) (i) a HVR-HI comprising the amino acid sequence X₁X₂DIS, wherein X₁ is S or H, X₂ is Y, T, D or E (SEQ ID NO: 126), (ii) a HVR-H2 comprising the amino acid sequence IISX₁AGX₂X₃YX₄X₅X₆WAKX₇, wherein X₁ is Y or H, X₂ is S or K, X₃ is T, M or K, X₄ is Y or K, X₅ is A, M or E, X₆ is S or E, X₇ is G or K (SEQ ID NO: 127), (iii) a HVR-H3 comprising the amino acid sequence GVPAX₁SX₂GGDX₃, wherein X₁ is Y or H, X₂ is T or H, X₃ is L or K (SEQ ID NO: 128), (iv) a HVR-LI comprising the amino acid sequence X₁X₂SQX₃VX₄X₅X₆NWLS, wherein X₁ is Q or T, X₂ is S or T, X₃ is S or E, X₄ is Y or F, X₅ is D or H, X₆ is N, D, A or E (SEQ ID NO: 129); (v) a HVR-L2 comprising the amino acid sequence WAX₁TLAX₂, wherein X₁ is S or E, X₂ is S, Y, F or W (SEQ ID NO: 130); and (vi) a HVR-L3 comprising the amino acid sequence AGGYGGGX₁YA, wherein X₁ is L or R (SEQ ID NO: 131);
(d) (i) a HVR-L1 comprising the amino acid sequence X₁X₂SQX₃VX₄X₅X₆NWLS, wherein X₁ is Q or T, X₂ is S or T, X₃ is S or E, X₄ is Y or F, X₅ is D or H, X₆ is N, D, A or E (SEQ ID NO: 129); (ii) a HVR-L2 comprising the amino acid sequence WAX₁TLAX₂, wherein X₁ is S or E, X₂ is S, Y, F or W (SEQ ID NO: 130); and (iii) a HVR-L3 comprising the amino acid sequence AGGYGGGX₁YA, wherein X₁ is L or R (SEQ ID NO: 131). In some embodiments the antibody of (b) further comprises a heavy chain variable domain framework FR1 comprising the amino acid sequence of SEQ ID NO: 132, 133, or 134; FR2 comprising the amino acid sequence of SEQ ID NO: 135 or 136; FR3 comprising the amino acid sequence of SEQ ID NO: 137; and FR4 comprising the amino acid sequence of SEQ ID NO: 138. In some embodiments, the antibody of (d), further comprises a light chain variable domain framework FR1 comprising the amino acid sequence of SEQ ID NO: 139; FR2 comprising the amino acid sequence of SEQ ID NO: 140 or 141; FR3 comprising the amino acid sequence of SEQ ID NO: 142 or 143; and FR4 comprising the amino acid sequence of SEQ ID NO: 144. In some embodiments, the antibody further comprises a variant Fc region amino acid sequence of SEQ ID NO: 229-380, or 381.

[0041] In some embodiments, an isolated anti-myostatin antibody of the present invention comprises (a) a HVR-H3 comprising the amino acid sequence GVPAX₁SX₂GGDX₃, wherein X₁ is Y or H, X₂ is T or H, X₃ is L or K (SEQ ID NO: 128), (b) a HVR-L3 comprising the amino acid sequence AGGYGGGX₁YA, wherein X₁ is L or R (SEQ ID NO: 131), and (c) a HVR-H2 comprising the amino acid sequence IISX₁AGX₂X₃YX₄X₅X₆WAKX₇, wherein X₁ is Y or H, X₂ is S or K, X₃ is T, M or K, X₄ is Y or K, X₅ is A, M or E, X₆ is S or E, X₇ is G or K (SEQ ID NO: 127).

[0042] In some embodiments, an isolated anti-myostatin antibody of the present invention comprises (a) a HVR-H1 comprising the amino acid sequence X₁X₂DIS, wherein X₁ is S or H, X₂ is Y, T, D or E (SEQ ID NO: 126), (b) a HVR-H2 comprising the amino acid sequence IISX₁AGX₂X₃YX₄X₅X₆WAKX₇, wherein X₁ is Y or H, X₂ is S or K, X₃ is T, M or K, X₄ is Y or K, X₅ is A, M or E, X₆ is S or E, X₇ is G or K (SEQ ID NO: 127), and (c) a HVR-H3 comprising the amino acid sequence GVPAX₁SX₂GGDX₃, wherein X₁ is Y or H, X₂ is T or H, X₃ is L or K (SEQ ID NO: 128). In further embodiments, the antibody comprises a heavy chain variable domain framework FR1 comprising the amino acid sequence of SEQ ID NO: 132, 133, or 134; FR2 comprising the amino acid sequence of SEQ ID NO: 135 or 136; FR3 comprising the amino acid sequence of SEQ ID NO: 137; and FR4 comprising the amino acid sequence of SEQ ID NO:138. In further embodiments, the antibody additionally comprises (a) a HVR-L comprising the amino acid sequence X₁X₂SQX₃VX₄X₅X₆NWLS, wherein X₁ is Q or T, X₂ is S or T, X₃ is S or E, X₄ is Y or F, X₅ is D or H, X₆ is N, D, A or E (SEQ ID NO: 129); (b) a HVR-L2 comprising the amino acid sequence WAX₁TLAX₂, wherein X₁ is S or E, X₂ is S, Y, F or W (SEQ ID NO: 130); and (c) a HVR-L3 comprising the amino acid sequence AGGYGGGX₁YA, wherein X₁ is L or R (SEQ ID NO: 131).

[0043] In some embodiments, an isolated anti-myostatin antibody of the present invention comprises (a) a HVR-L1 comprising the amino acid sequence X₁X₂SQX₃VX₄X₅X₆NWLS, wherein X₁ is Q or T, X₂ is S or T, X₃ is S or E, X₄ is Y or F, X₅ is D or H, X₆ is N, D, A or E (SEQ ID NO: 129); (b) a HVR-L2 comprising the amino acid sequence WAX₁TLAX₂, wherein X₁ is S or E, X₂ is S, Y, F or W (SEQ ID NO: 130); and (c) a HVR-L3 comprising the amino acid sequence AGGYGGGX₁YA, wherein X₁ is L or R (SEQ ID NO: 131). In a further embodiment, the antibody further comprises a light chain variable domain framework FR comprising the amino acid sequence of SEQ ID NO: 139; FR2 comprising the amino acid sequence of SEQ ID NO: 140 or 141; FR3 comprising the amino acid sequence of SEQ ID NO: 142 or 143; and FR4 comprising the amino acid sequence of SEQ ID NO: 144.

[0044] In some embodiments, an isolated anti-myostatin antibody of the present invention comprises a heavy chain variable domain framework FR1 comprising the amino acid sequence of SEQ ID NO: 132, 133, or 134; FR2 comprising the amino acid sequence of SEQ ID NO: 135 or 136; FR3 comprising the amino acid sequence of SEQ ID NO: 137; and FR4 comprising the amino acid sequence of SEQ ID NO: 138. In some embodiments, an isolated anti-myostatin antibody of the present invention comprises a light chain variable domain framework FR1 comprising the amino acid sequence of SEQ ID NO: 139; FR2 comprising the amino acid sequence of SEQ ID NO: 140 or 141; FR3 comprising the amino acid sequence of SEQ ID NO: 142 or 143; and FR4 comprising the amino acid sequence of SEQ ID NO: 144.

[0045] In some embodiments, an isolated anti-myostatin antibody of the present invention comprises (a) a VH sequence having at least 95% sequence identity to the amino acid sequence of SEQ ID NO: 13, 16-30, 32-34, 86-94, or 95; (b) a VL sequence having at least 95% sequence identity to the amino acid sequence of SEQ ID NO: 15, 31, 35-38, 96-98, or 99; or (c) a VH sequence as in (a) and a VL sequence as in (b). In further embodiments, the antibody comprises a VH sequence of SEQ ID NO: 13, 16-30, 32-34, 86-94, or 95. In further embodiments, the antibody comprises a VL sequence of SEQ ID NO: 15, 31, 35-38, 96-98, or 99. In some embodiments, the antibody comprises a VH sequence of SEQ ID NO: 13, 16-30, 32-34, 86-94, or 95. In further embodiments, the antibody comprises a VH sequence of SEQ ID NO: 13, 16-30, 32-34, 86-94, or 95; and a VL sequence of SEQ ID NO: 15, 31, 35-38, 96-98, or 99. In some embodiments, the antibody further comprises the variant Fc region amino acid sequence of SEQ ID NO: 229-380, or 381.

[0046] In some embodiments, an isolated anti-myostatin antibody of the present invention comprises a variant Fc region provided herein. In some embodiments, the anti-myostatin antibody comprises an amino acid alteration described in Table 14-29, or 30. In some embodiments, the anti-myostatin antibody comprises the amino acid sequence of SEQ ID NO: 229-380, or 381.

[0047] The invention also provides isolated nucleic acids encoding an anti-myostatin antibody of the present invention. The invention also provides host cells comprising a nucleic acid of the present invention. The invention also provides a method of producing an antibody comprising culturing a host cell of the present invention so that the antibody is produced.

[0048] In some aspects the invention provides a method of producing an anti-myostatin antibody comprising: (a) culturing a host cell of the present invention so that the antibody is produced; or (b) immunizing an animal against a polypeptide, wherein the polypeptide comprises the region corresponding to amino acids at positions 21 to 100 of myostatin propeptide (SEQ ID NO: 78).

[0049] The invention further provides a method of producing an anti-myostatin antibody. In some embodiments, the method comprises immunizing an animal against a polypeptide, wherein the polypeptide comprises the region corresponding to amino acids at positions 21-100 of myostatin propeptide (SEQ ID NO: 78).

[0050] In some embodiments, an anti-myostatin antibody provided herein is used in a method for detecting the presence of myostatin in a biological sample. In other embodiments, an anti-myostatin antibody is used in a method of blocking the release of mature myostatin from latent myostatin in a biological sample that comprises contacting the biological sample containing latent myostatin with the antibody under conditions permissive for binding of the antibody to the latent myostatin, and blocking release of mature myostatin from the latent myostatin. In additional embodiments, an anti-myostatin antibody provided herein is used in a method of reducing the concentration of latent myostatin in a biological sample that comprises contacting the biological sample containing latent myostatin with the antibody under conditions permissive for binding of the antibody to the latent myostatin, and removing the complex formed between the antibody and the latent myostatin. In some embodiments, one or more of the above methods is performed in vitro. In some embodiments, one or more of the above methods is performed in vivo.

[0051] The invention also provides a pharmaceutical formulation comprising an anti-myostatin antibody of the present invention and a pharmaceutically acceptable carrier.

[0052] Anti-myostatin antibodies of the present invention may be for use as a medicament. In some embodiments, the antibody is used in the manufacture of a medicament for: (a) treatment of a muscle wasting disease; (b) increasing mass of muscle tissue; (c) increasing strength of muscle tissue; or (d) reducing body fat accumulation. In some embodiments, anti-myostatin antibodies of the present invention may be for use in treating a muscle wasting disease. Anti-myostatin antibodies of the present invention may be for use in increasing mass of muscle tissue. Anti-myostatin antibodies of the present invention may be for use in increasing strength of muscle tissue. Anti-myostatin antibodies of the present invention may be for use in reducing body fat accumulation.

[0053] In some embodiments, an anti-myostatin antibody provided herein has use in: (a) treating a muscle wasting disease; (b) increasing mass of muscle tissue; (c) increasing strength of muscle tissue; or (d) reducing body fat accumulation.

[0054] Anti-myostatin antibodies of the present invention may be used in the manufacture of a medicament. In some embodiments, the antibody is used in the manufacture of a medicament for: (a) treatment of a muscle wasting disease; (b) increasing mass of muscle tissue; (c) increasing strength of muscle tissue; or (d) reducing body fat accumulation In some embodiments, the medicament is for treatment of a muscle wasting disease. In some embodiments, the medicament is for increasing mass of muscle tissue. In some embodiments, the medicament is for increasing strength of muscle tissue. In some embodiments, the medicament is for reducing body fat accumulation.

[0055] The invention also provides a method of treating an individual having a muscle wasting disease. In some embodiments, the method comprises administering to the individual an effective amount of an anti-myostatin antibody of the present invention. The invention also provides a method of increasing mass of muscle tissue in an individual. In some embodiments, the method comprises administering to the individual an effective amount of an anti-myostatin antibody of the present invention to increase mass of muscle tissue. The invention also provides a method of increasing strength of muscle tissue in an individual. In some embodiments, the method comprises administering to the individual an effective amount of an anti-myostatin antibody of the present invention to increase strength of muscle tissue. The invention also provides a method of reducing body fat accumulation in an individual. In some embodiments, the method comprises administering to the individual an effective amount of an anti-myostatin antibody of the present invention to reduce body fat accumulation.

[0056] The invention provides polypeptides comprising variant Fc regions and methods of making and using the same.

[0057] In one embodiment, the invention provides FcγRIIB-binding polypeptides comprising variant Fc regions and methods of using the same. In some embodiments, a variant Fc region with enhanced FcγRIIb-binding activity of the present invention comprises at least one amino acid alteration in a parent Fc region. In further embodiments, the ratio of [KD value of the parent Fc region for monkey FcγRIIb]/[KD value of the variant Fc region for monkey FcγRIIb] is 2.0 or greater. In further embodiments, the ratio of [KD value of the parent Fc region for monkey FcγRIIIa]/[KD value of the variant Fc region for monkey FcγRIIIa] is 0.5 or smaller. In further embodiments, the ratio of [KD value of the parent Fc region for human FcγRIIb]/[KD value of the variant Fc region for human FcγRIIb] is 2.0 or greater. In further embodiments, the ratio of [KD value of the parent Fc region for human FcγRIIIa]/[KD value of the variant Fc region for human FcγRIIIa] is 0.5 or smaller. In further embodiments, the ratio of [KD value of the parent Fc region for human FcγRIIa (type H)]/[KD value of the variant Fc region for human FcγRIIa (type H)] is 5.0 or smaller. In further embodiments, the ratio of [KD value of the parent Fc region for human FcγRIIa (type R)]/[KD value of the variant Fc region for human FcγRIIa (type R)] is 5.0 or smaller. In another embodiment, the KD value of the variant Fc region for monkey FcγRIIb is 1.0×10⁻⁶ M or smaller. In another embodiment, the KD value of the variant Fc region for monkey FcγRIIIa is 5.0×10⁻⁷ M or greater. In another embodiment, the KD value of the variant Fc region for human FcγRIIb is 2.0×10⁻⁶ M or smaller. In another embodiment, the KD value of the variant Fc region for human FcγRIIIa is 1.0×10⁻⁶ M or greater. In another embodiment, the KD value of the variant Fe region for human FcγRIIa (type H) is 1.0×10⁻⁷ M or greater. In another embodiment, the KD value of the variant Fc region for human FcγRIIa (type R) is 2.0×10⁻⁷ M or greater.

[0058] In some embodiments, a variant Fc region with enhanced FcγRIIb-binding activity of the present invention comprises at least one amino acid alteration of at least one position selected from the group consisting of: 231, 232, 233, 234, 235, 236, 237, 238, 239, 264, 266, 267, 268, 271, 295, 298, 325, 326, 327, 328, 330, 331, 332, 334, and 396, according to EU numbering.

[0059] In further embodiments, the variant Fc region with enhanced FcγRIIb-binding activity comprises at least two amino acid alterations comprising: (a) one amino acid alteration at position 236, and (b) at least one amino acid alteration of at least one position selected from the group consisting of: (i) position 231, 232, 233, 234, 235, 237, 238, 239, 264, 266, 267, 268, 271, 295, 298, 325, 326, 327, 328, 330, 331, 332, 334, and 396; (ii) position: 231, 232, 235, 239, 268, 295, 298, 326, 330, and 396; or (iii) position 268, 295, 326, and 330; according to EU numbering.

[0060] In further embodiments, the variant Fc region with enhanced FcγRIIb-binding activity comprises at least two amino acid alterations comprising: (a) one amino acid alteration at position 236, and (b) at least one amino acid alteration of at least one position selected from the group consisting of: 231, 232, 233, 234, 235, 237, 238, 239, 264, 266, 267, 268, 271, 295, 298, 325, 326, 327, 328, 330, 331, 332, 334, and 396, according to EU numbering.

[0061] In further embodiments, the variant Fc region with enhanced FcγRIIb-binding activity comprises at least two amino acid alterations comprising: (a) one amino acid alteration at position 236, and (b) at least one amino acid alteration of at least one position selected from the group consisting of: 231, 232, 235, 239, 268, 295, 298, 326, 330, and 396, according to EU numbering.

[0062] In further embodiments, the variant Fc region with enhanced FcγRIIb-binding activity comprises at least two amino acid alterations comprising: (a) one amino acid alteration at position 236, and (b) at least one amino acid alteration of at least one position selected from the group consisting of: 268, 295, 326, and 330 according to EU numbering.

[0063] In some embodiments, a variant Fc region with enhanced FcγRIIb-binding activity of the present invention comprises at least one amino acid selected from the group consisting of: (a) Asp, Glu, Phe, Gly, His, lie, Lys, Leu, Met, Asn, Pro, Gln, Arg, Ser, Thr, Val, Trp, Tyr at position 231; (b) Ala, Asp, Glu, Phe, Gly, His, Ile, Lys, Leu, Met, Asn, Gln, Arg, Ser, Thr, Val, Trp, Tyr at position 232; (c) Asp at position 233; (d) Trp, Tyr at position 234; (e) Trp at position 235; (f) Ala, Asp, Glu, His, Ile, Leu, Met, Asn, Gln, Ser, Thr, Val at position 236; (g) Asp, Tyr at position 237; (h) Glu, Ile, Met, Gln, Tyr at position 238; (i) Ile, Leu, Asn, Pro, Val at position 239; (i) Ile at position 264; (k) Phe at position 266; (l) Ala, His, Leu at position 267; (m) Asp, Glu at position 268; (n) Asp, Glu, Gly at position 271; (o) Leu at position 295; (p) Leu at position 298; (q) Glu, Phe, Ile, Leu at position 325; (r) Thr at position 326; (s) Ile, Asn at position 327; (t) Thr at position 328; (u) Lys, Arg at position 330; (v) Glu at position 331; (w) Asp at position 332; (x) Asp, Ile, Met, Val, Tyr at position 334; and (y) Ala, Asp, Glu, Phe, Gly, His, Ile, Lys, Leu, Met, Asn, Gln, Arg, Ser, Thr. Val, Trp, Tyr at position 396; according to EU numbering.

[0064] In further embodiments, the variant Fc region with enhanced FcγRIIb-binding activity comprises at least one amino acid selected from the group consisting of: (a) Gly, Thr at position 231; (b) Asp at position 232; (c) Trp at position 235; (d) Asn, Thr at position 236; (e) Val at position 239; (f) Asp, Glu at position 268; (g) Leu at position 295; (h) Leu at position 298; (i) Thr at position 326; (j) Lys, Arg at position 330, and (k) Lys, Met at position 396; according to EU numbering.

[0065] In another embodiment, the invention provides a polypeptide comprising an isoelectric point (pI)-increased variant Fc region and a method of using the same. In some embodiments, a polypeptide comprising a variant Fc region with increased pI comprises at least two amino acid alterations in a parent Fc region. In further embodiments, each of the amino acid alterations increases the isoelectric point (pI) of the variant Fc region compared with that of the parent Fc region. In further embodiments, the amino acid can be exposed on the surface of the variant Fc region. In further embodiments, a polypeptide comprises the variant Fc region and an antigen-binding domain. In further embodiments, antigen-binding activity of the antigen-binding domain changes according to ion concentration conditions. In further embodiments, the variant Fc region with increased pI of the present invention comprises at least two amino acid alterations of at least two positions selected from the group consisting of: 285, 311, 312, 315, 318, 333, 335, 337, 341, 342, 343, 384, 385, 388, 390, 399, 400, 401, 402, 413, 420, 422, and 431 according to EU numbering. In further embodiments, the variant Fc region with increased pI comprises Arg or Lys at each of the positions selected.

[0066] In some embodiments, a variant Fc region of the present invention comprises amino acid alterations described in Tables 14-30.

[0067] In some embodiments, a polypeptide comprises a variant Fc region of the present invention. In further embodiments, the parent Fc region is derived from human IgG1. In further embodiments, the polypeptide is an antibody. In further embodiments, the polypeptide is an Fc fusion protein.

[0068] The invention provides a polypeptide comprising the amino acid sequence of SEQ ID NO: 229-380, or 381.

[0069] The invention also provides isolated nucleic acid encoding the polypeptide comprising a variant Fc region of the present invention. The invention also provides a host cell comprising the nucleic acid of the present invention. The invention also provides a method of producing a polypeptide comprising a variant Fc region comprising culturing the host of the present invention so that the polypeptide is produced. The invention additionally provides a method of suppressing the activation of an immune cell in a biological sample comprising contacting a biological sample containing an immune cell with a polypeptide comprising a variant Fc region of the present invention.

[0070] The invention additionally provides a pharmaceutical formulation comprising the polypeptide comprising a variant Fc region of the present invention and a pharmaceutically acceptable carrier. The invention also provides methods of treatment that include but are not limited to methods of treating an individual having an immunological inflammatory disease, autoimmune disease, or viral infection that comprise administering to the individual an effective amount of a polypeptide comprising a variant Fc region provided herein.

### BRIEF DESCRIPTION OF THE DRAWINGS/FIGURES

[0071] FIG. 1 illustrates inhibition of proteolytic activation of latent myostatin by anti-latent myostatin antibody, as described in Example 3. The activity of active myostatin released from latent myostatin by BMP1 protease was measured in the presence of anti-latent myostatin antibody, using HEK Blue Assay.

[0072] FIG. 2 illustrates inhibition of spontaneous activation of latent myostatin by anti-latent myostatin antibody, as described in Example 4. The activity of active myostatin released from latent myostatin by 37° C. incubation was measured in the presence of anti-latent myostatin antibody, using HEK Blue Assay.

[0073] FIG. 3 illustrates binding of anti-latent myostatin antibody to propeptide domain, as described in Example 5.

[0074] FIG. 4 illustrates Western Blot analysis against myostatin propeptide, as described in Example 6. Proteolytic cleavage of myostatin propeptide by BMP1 was assessed in the presence and absence of anti-latent myostatin antibody.

[0075] FIGS. 5A-5C illustrate BIACORE® sensorgrams of anti-latent myostatin antibody MST1032-Glm towards human latent myostatin (A), cynomolgus monkey latent myostatin (B), and mouse latent myostatin (C), as described in Example 7.

[0076] FIG. 6A illustrates in vivo efficacy of anti-latent myostatin antibody and anti-mature myostatin antibody on muscle mass and fat mass, as described in Example 8. Anti-latent myostatin antibody (MST1032-Glm; described as MST1032 in the Figures) or anti-mature myostatin antibody (41C1E4) was administered to SCID mice, and full body lean mass (LBM) was measured.

[0077] FIG. 6B illustrates in vivo efficacy of anti-latent myostatin antibody and anti-mature myostatin antibody on muscle mass and fat mass, as described in Example 8. Anti-latent myostatin antibody (MST1032-Glm; described as MST1032 in the Figures) or anti-mature myostatin antibody (41C1E4) was administered to SCID mice, and change of full body fat mass from Day 0 to Day 14 was measured.

[0078] FIG. 6C illustrates in vivo efficacy of anti-latent myostatin antibody and anti-mature myostatin antibody on muscle mass and fat mass, as described in Example 8. Anti-latent myostatin antibody (MST1032-G1 m; described as MST1032 in the Figures) or anti-mature myostatin antibody (41C1E4) was administered to SCID mice, and gastrocnemius and quadriceps muscle mass was measured.

[0079] FIG. 7A illustrates comparison of in vivo efficacy among several anti-myostatin antibodies, as described in Example 9. Anti-latent myostatin antibody (MST1032-G1 m; described as MST1032 in the Figures) or anti-mature myostatin antibodies (41C1E4, REGN, OGD, and MYO-029) was administered to SCID mice, and full body lean mass was measured.

[0080] FIG. 7B illustrates comparison of in vivo efficacy among several anti-myostatin antibodies, as described in Example 9. Anti-latent myostatin antibody (MST1032-Glm; described as MST1032 in the Figures) or anti-mature myostatin antibodies (41C1E4, REGN, OGD, and MYO-029) was administered to SCID mice, and grip strength was measured.

[0081] FIG. 7C illustrates comparison of in vivo efficacy among several anti-myostatin antibodies, as described in Example 9. Anti-latent myostatin antibody (MST1032-Glm; described as MST1032 in the Figures) or anti-mature myostatin antibodies (41C1E4, REGN, OGD, and MYO-029) was administered to SCID mice, and change of full body fat mass from Day 0 to Day 14 was measured.

[0082] FIG. 8 illustrates inhibition of proteolytic and spontaneous activation of latent myostatin by humanized anti-latent myostatin antibody, as described in Example 10. The activity of active myostatin released from latent myostatin by BMP1 protease (proteolytic) or by 37° C. incubation without BMP1 (spontaneous) was measured in the presence of anti-latent myostatin antibody, using HEK Blue Assay.

[0083] FIG. 9 illustrates BIACORE® sensorgrams of histidine substituted variants of anti-latent myostatin antibody, as described in Example 11. The antibody/antigen complexes were allowed to dissociate at pH7.4, followed by additional dissociation at pH5.8 (pointed by an arrow) to assess the pH-dependent interactions. Antibodies tested in this experiment are: Ab001 (black solid curve), Ab002 (black short-dashed curve), Ab003 (black dotted curve), Ab004 (gray short-dashed curve), Ab005 (gray solid curve), Ab006 (gray long-dashed curve), and Ab007 (black long-dashed curve).

[0084] FIGS. 10A-10D illustrate the inhibition of proteolytic and spontaneous activation of latent myostatin by pH-dependent anti-latent myostatin antibodies, as described in Example 13. The activity of active myostatin released from latent myostatin by BMP1 protease (proteolytic) or by 37° C. incubation without BMP1 (spontaneous) was measured in the presence of anti-latent myostatin antibodies, using HEK Blue Assay. Antibodies (A) MS1032LO01-SG1, (B) MS1032LO02-SG1, (C) MS1032LO03-SG1, and (D) MS1032LO04-SG1 are described, respectively, as MSLO-01, MSLO-02, MSLO-03, and MSLO-04 in the Figure. Comparable inhibition of proteolytic and spontaneous activation of latent myostatin to MS1032LO00-SG1 was achieved by MS1032LO01-SG1, MS1032LO02-SG1, MS1032LO03-SG1, and MS1032LO04-SG1.

[0085] FIGS. 11A-11F illustrate BIACORE® sensorgrams of pH-dependent anti-latent myostatin antibody, as described in Example 14. Kinetic parameters of MST1032-SG1 (A), MS1032LO00-SG1 (B), MS1032LO01-SG1 (C), MS1032LO02-SG1 (D), MS1032LO03-SG1 (E), and MS1032LO04-SG1 (F), were measured at neutral pH and acidic pH.

[0086] FIG. 12 illustrates the time course of plasma myostatin concentration after intravenous administration of an anti-myostatin antibody in mice, as described in Example 15. The effects of FcγR-mediated cellular uptake of antibody/antigen complexes on myostatin clearance in vivo was assessed by comparing anti-myostatin antibodies with FcγR binding (MS1032LO00-SG1) and anti-myostatin antibodies with abolished FcγR binding (MS1032LO00-F760).

[0087] FIG. 13 illustrates the time course of plasma myostatin concentration after intravenous administration of an anti-myostatin antibody in mice, as described in Example 16. The effects of pH-dependent binding of anti-myostatin antibody on myostatin clearance in vivo was assessed by comparing pH-dependent anti-myostatin antibody (MS1032LO01-SG1 or MS1032LO01-F760) and non pH-dependent anti-myostatin antibody (MS1032LO00-SG1 or MS1032LO00-F760).

[0088] FIGS. 14A-14E illustrate in vivo efficacy of pH-dependent and non pH-dependent anti-latent myostatin antibodies, as described in Example 17. pH-dependent anti-latent myostatin antibody (MS1032LO01-SG1; described as MSLO1 in the Figure) or non pH-dependent anti-latent myostatin antibody (MS1032LO00-SG1; described as MSLO0 in the Figure) was administered to SCID mice, and full body lean mass (A), full body fat mass (B), quadriceps muscle mass (C), gastrocnemius muscle mass (D), and grip strength (E) was measured.

[0089] FIG. 15 illustrates binding activity of anti-latent myostatin antibody MST1032 to latent myostatin and GDF11, as described in Example 19.

[0090] FIG. 16 illustrates the inhibitory activity of anti-latent myostatin antibody MST1032 against proteolytic and spontaneous activation of GDF11, as described in Example 20. The activity of active GDF11 released by BMP1 protease (proteolytic) or by 37° C. incubation without BMP1 (spontaneous) was measured in the presence of anti-latent myostatin antibody, using HEK Blue Assay.

[0091] FIG. 17 illustrates inhibition of proteolytic activation of latent myostatin by anti-latent myostatin antibody, as described in Example 22. The activity of active myostatin released from latent myostatin by BMP1 protease was measured in the presence of anti-latent myostatin antibody, using HEK Blue Assay.

[0092] FIG. 18 illustrates the time course of plasma myostatin concentration after intravenous administration of anti-latent myostatin antibodies in mice, as described in Example 23. The effects of pH dependency on myostatin clearance in vivo was assessed by comparing non-pH dependent anti-latent myostatin antibody (MS1032LO00-SG1) and different pH-dependent anti-latent myostatin antibodies (MS1032LO01-SG1, MS1032LO06-SG1, MS1032LO11-SG1, MS1032LO18-SG1, MS1032LO19-SG1, MS1032LO21-SG1 and MS1032LO25-SG1).

[0093] FIGS. 19A and 19B illustrate the time course of plasma myostatin concentration after intravenous administration of anti-latent myostatin antibodies in cynomolgus monkey, as described in Example 24. (A) The effect of pH-dependency and Fc engineering on myostatin clearance in vivo was assessed by comparing non pH-dependent anti-latent myostatin antibody (MS1032LO00-SG1) and pH-dependent anti-latent myostatin antibodies with Fc engineering (MS1032LO06-SG1012, MS1032LO06-SG1016, MS1032LO06-SG1029, MS1032LO06-SG1031, MS1032LO06-SG1033, MS1032LO06-SG1034). (B) The effect of Fc engineering on myostatin clearance in vivo was assessed by comparing anti-latent myostatin antibodies (MS1032LO19-SG1079, MS1032LO19-SG1071, MS1032LO19-SG1080, MS1032LO19-SG1074, MS1032LO19-SG1081, and MS1032LO19-SG1077).

[0094] FIGS. 20A-20I illustrate in vivo efficacy of anti-latent myostatin antibodies (MS1032 variants) on lean body mass (LBM), grip strength, and body fat mass, as described in Example 25. MS1032LO06-SG1, MS1032LO11-SG1, and MS1032LO18-SG1 was administered to Scid mice, and lean body mass (A), grip strength (D), and body fat mass (G) were measured. MS1032LO06-SG1, MS1032LO19-SG1, and MS1032LO25-SG1 were administered to Scid mice, and lean body mass (B), grip strength (E), and body fat mass (H) were measured. MS1032LO01-SG1, MS1032LO06-SG1, and MS1032LO11-SG1 were administered to Scid mice, and lean body mass (C), grip strength (F), and body fat mass (I) were measured.

[0095] FIG. 21 illustrates inhibitory activity on latent myostatin activation by anti-latent myostatin antibodies, as described in Example 26. The amounts of mature myostatin released from latent myostatin by BMP1 protease were measured in the presence of anti-latent myostatin antibodies (MST1032, MST1504, MST1538, MST1551, MST1558, MST1572, and MST1573).

[0096] FIG. 22A illustrates a schematic diagram of latent myostatin fragments of 100 amino acid each, designed for epitope mapping of anti-latent myostatin antibodies, as described in Example 26.

[0097] FIG. 22B illustrates Western blotting analysis against GST tagged human latent myostatin fragments (GST-hMSTN) by an anti-GST antibody, as described in Example 26. Each lane indicates: 1, GST-hMSTN 1-100aa; 2, GST-hMSTN 21-120aa; 3, GST-hMSTN 41-140aa; 4, GST-hMSTN 61-160aa; 5, GST-hMSTN 81-180aa; 6, GST-hMSTN 101-200aa; 7, GST-hMSTN 121-220aa; 8, GST-hMSTN 141-241aa; 9, GST control.

[0098] FIG. 22C illustrates Western blotting analysis against GST tagged human latent myostatin fragments (GST-hMSTN) by anti-latent myostatin antibodies (MST1032, MST1538, MST1572, and MST1573), as described in Example 26. Each lane indicates: 1, GST-hMSTN 1-100aa; 2, GST-hMSTN 21-120aa; 3, GST-hMSTN 41-140aa; 4, GST-hMSTN 61-160aa; 5, GST-hMSTN 81-180aa; 6, GST-hMSTN 101-200aa; 7, GST-hMSTN 121-220aa; 8, GST-hMSTN 141-241 aa; 9, GST control; 10, human latent myostatin (100 ng).

[0099] FIG. 22D illustrates summarized results of Western blotting analysis and deduced epitope positions for anti-latent myostatin antibodies (MST1032, MST1538, MST1572, and MST1573), as described in Example 26.

[0100] FIG. 23 illustrates an alignment of amino acid sequences of cynomolgus (cyno) FcγRIIa1, FcγRIIa2, FcγRIIa3, FcγRIIb, human FcγRIIaH, FcγRIIaR, and FcγRIIb. Squared regions indicate putative residues which interact with Fc domain.

[0101] FIG. 24 illustrates the time course of total myostatin concentration in plasma after intravenous administration of an anti-myostatin antibody with an FcγRIIb-enhanced Fc variant in all human FcγR transgenic mice, as described in Example 28. The effects of FcγRIIb-enhanced Fc variants on antigen elimination through human FcγRIIb were evaluated.

[0102] FIG. 25 illustrates the time course of antibody concentration in plasma after intravenous administration of an anti-myostatin antibody with an FcγRIIb-enhanced Fc variant in all human FcγR transgenic mice, as described in Example 28. The effects of FcγRIIb-enhanced Fc variants on antibody pharmacokinetics were evaluated.

[0103] FIGS. 26A and 26B illustrate the time course of plasma myostatin concentration after intravenous administration of anti-latent myostatin antibodies in cynomolgus monkey, as described in Example 29. (A) The effect of pH-dependency and Fc engineering on myostatin clearance in vivo was assessed by comparing non pH-dependent anti-latent myostatin antibody (MS1032LO00-SG1) and pH-dependent anti-latent myostatin antibodies with Fc engineering (MS1032LO06-SG1012, MS1032LO06-SG1016, MS1032LO06-SG1029, MS1032LO06-SG1031, MS1032LO06-SG1033, MS1032LO06-SG1034). (B) The effect of Fc engineering on myostatin clearance in vivo was assessed by comparing anti-latent myostatin antibodies (MS1032LO19-SG1079, MS1032LO19-SG1071, MS1032LO19-SG1080, MS1032LO19-SG1074, MS1032LO19-SG1081, and MS1032LO19-SG1077).

[0104] FIG. 27A illustrates the time course of total myostatin concentration in plasma after intravenous administration of an anti-myostatin antibody with a pI-increased Fc variant in human FcRn transgenic mice, as described in Example 30. The effects of pI-increased Fc variants on antigen elimination were evaluated.

[0105] FIG. 27B illustrates the time course of antibody concentration in plasma after intravenous administration of an anti-myostatin antibody with a pI-increased Fc variant in human FcRn transgenic mice, as described in Example 30. The effects of pI-increased Fc variants on antibody pharmacokinetics were evaluated.

[0106] FIG. 28A illustrates the time course of total myostatin concentration in plasma after intravenous administration of an anti-myostatin antibody with a pI-increased Fc variant in human FcRn transgenic mice, as described in Example 30. The effects of pI-increased Fc variants on antigen elimination were evaluated. In this assay, an excess of human normal immunoglobin were co-administered with the anti-myostatin antibody in order to mimic the situation of human plasma.

[0107] FIG. 28B illustrates the time course of antibody concentration in plasma after intravenous administration of an anti-myostatin antibody with a pI-increased Fc variant in human FcRn transgenic mice, as described in Example 30. The effects of pI-increased Fc variants on antibody pharmacokinetics were evaluated. In this assay, an excess of human normal immunoglobin were co-administered with the anti-myostatin antibody in order to mimic the situation of human plasma.

[0108] FIG. 29 illustrates the time course of total myostatin concentration in plasma after intravenous administration of an anti-myostatin antibody with an FcγRIIb-enhanced Fc variant in human FcγRIIb transgenic mice, as described in Example 31. The effects of FcγRIIb-enhanced Fc variants on antigen elimination through human FcγRIIb were evaluated.

[0109] FIG. 30 illustrates the time course of antibody concentration in plasma after intravenous administration of an anti-myostatin antibody with an FcγRIIb-enhanced Fc variant in human FcγRIIb transgenic mice, as described in Example 31. The effects of FcγRIIb-enhanced Fc variants on antibody pharmacokinetics were evaluated.

[0110] FIG. 31 illustrates results of cell imaging analysis of anti-myostatin antibodies with an FcγRIIb-enhanced Fc variant, as described in Example 33. Each antibody was complexed with fluorescence-labelled myostatin and intracellular uptake of the antigen-antibody complex into cells expressing human FcγRIIb was measured.

### DETAILED DESCRIPTION

[0111] The techniques and procedures described or referenced herein are generally well understood and commonly employed using conventional methodology by those skilled in the art, such as, for example, the widely utilized methodologies described in Sambrook et al., Molecular Cloning: A Laboratory Manual 3d edition (2001) Cold Spring Harbor Laboratory Press, Cold Spring Harbor, N.Y.; Current Protocols in Molecular Biology (F. M. Ausubel, et al., eds., (2003)); the series Methods in Enzymology (Academic Press, Inc.): PCR 2: A Practical Approach (M. J. MacPherson, B. D. Hames and G. R. Taylor eds. (1995)), Harlow and Lane, eds. (1988) Antibodies, A Laboratory Manual, and Animal Cell Culture (R. I. Freshney, ed. (1987)); Oligonucleotide Synthesis (M. J. Gait, ed., 1984); Methods in Molecular Biology, Humana Press; Cell Biology: A Laboratory Notebook (J. E. Cellis, ed., 1998) Academic Press: Animal Cell Culture (R. I. Freshney), ed., 1987); Introduction to Cell and Tissue Culture (J. P. Mather and P. E. Roberts, 1998) Plenum Press; Cell and Tissue Culture: Laboratory Procedures (A. Doyle, J. B. Griffiths, and D. G. Newell, eds., 1993-8) J. Wiley and Sons; Handbook of Experimental Immunology (D. M. Weir and C. C. Blackwell, eds.); Gene Transfer Vectors for Mammalian Cells (J. M. Miller and M. P. Calos, eds., 1987); PCR: The Polymerase Chain Reaction, (Mullis et al., eds., 1994); Current Protocols in Immunology (J. E. Coligan et al., eds., 1991); Short Protocols in Molecular Biology (Wiley and Sons, 1999); Immunobiology (C. A. Janeway and P. Travers, 1997); Antibodies (P. Finch, 1997); Antibodies: A Practical Approach (D. Catty., ed., IRL Press, 1988-1989); Monoclonal Antibodies: A Practical Approach (P. Shepherd and C. Dean, eds., Oxford University Press, 2000); Using Antibodies: A Laboratory Manual (E. Harlow and D. Lane, Cold Spring Harbor Laboratory Press, 1999); The Antibodies (M. Zanetti and J. D. Capra, eds., Harwood Academic Publishers, 1995); and Cancer: Principles and Practice of Oncology (V. T. DeVita et al., eds., J. B. Lippincott Company, 1993).

### I. DEFINITIONS

[0112] Unless defined otherwise, technical and scientific terms used herein have the same meaning as commonly understood by one of ordinary skill in the art to which this invention belongs. Singleton et al., Dictionary of Microbiology and Molecular Biology 2nd ed., J. Wiley & Sons (New York, N.Y. 1994), and March, Advanced Organic Chemistry Reactions, Mechanisms and Structure 4th ed., John Wiley & Sons (New York, N.Y. 1992), provide one skilled in the art with a general guide to many of the terms used in the present application. All references cited herein, including patent applications and publications, are incorporated by reference in their entirety. In particular, the disclosure of Japanese Pat. Appl. 2014-257636, filed Dec. 19, 2014, is herein incorporated by reference in its entirety.

[0113] For purposes of interpreting this specification, the following definitions will apply and whenever appropriate, terms used in the singular will also include the plural and vice versa. It is to be understood that the terminology used herein is for the purpose of describing particular embodiments only, and is not intended to be limiting. In the event that any definition set forth below conflicts with any document incorporated herein by reference, the definition set forth below shall control.

[0114] An “acceptor human framework” for the purposes herein is a framework comprising the amino acid sequence of a light chain variable domain (VL) framework or a heavy chain variable domain (VH) framework derived from a human immunoglobulin framework or a human consensus framework, as defined below. An acceptor human framework “derived from” a human immunoglobulin framework or a human consensus framework may comprise the same amino acid sequence thereof, or it may contain amino acid sequence changes. In some embodiments, the number of amino acid changes are 10 or less, 9 or less, 8 or less, 7 or less, 6 or less, 5 or less, 4 or less, 3 or less, or 2 or less. In some embodiments, the VL acceptor human framework is identical in sequence to the VL human immunoglobulin framework sequence or human consensus framework sequence.

[0115] “Affinity” refers to the strength of the sum total of noncovalent interactions between a single binding site of a molecule (e.g., an antibody) and its binding partner (e.g., an antigen). Unless indicated otherwise, as used herein, “binding affinity” refers to intrinsic binding affinity which reflects a 1:1 interaction between members of a binding pair (e.g., antibody and antigen). The affinity of a molecule X for its partner Y can generally be represented by the dissociation constant (Kd). Affinity can be measured by common methods known in the art, including those described herein. Specific illustrative and exemplary embodiments for measuring binding affinity are described in the following.

[0116] An “affinity matured” antibody refers to an antibody with one or more alterations in one or more hypervariable regions (HVRs), compared to a parent antibody which does not possess such alterations, such alterations resulting in an improvement in the affinity of the antibody for antigen.

[0117] The terms “anti-myostatin antibody” and “an antibody that binds to myostatin” refer to an antibody that is capable of binding myostatin with sufficient affinity such that the antibody is useful as a diagnostic and/or therapeutic agent in targeting myostatin. In one embodiment, the extent of binding of an anti-myostatin antibody to an unrelated, non-myostatin protein is less than about 10% of the binding of the antibody to myostatin as measured, e.g., by a radioimmunoassay (RIA). In certain embodiments, an antibody that binds to myostatin has a dissociation constant (Kd) of ≦1 μM, ≦100 nM, ≦10 nM, ≦1 nM, ≦0.1 nM, ≦0.01 nM, or ≦0.001 nM (e.g., 10⁻⁸ M or less, e.g., from 10⁻⁸ M to 10⁻¹³ M, e.g., from 10⁻⁹ M to 10⁻¹³ M). In certain embodiments, an anti myostatin antibody binds to an epitope of myostatin that is conserved among myostatin from different species.

[0118] The term “antibody” herein is used in the broadest sense and encompasses various antibody structures, including but not limited to monoclonal antibodies, polyclonal antibodies, multispecific antibodies (e.g., bispecific antibodies), and antibody fragments so long as they exhibit the desired antigen-binding activity.

[0119] An “antibody fragment” refers to a molecule other than an intact antibody that comprises a portion of an intact antibody that binds the antigen to which the intact antibody binds. Examples of antibody fragments include but are not limited to Fv, Fab, Fab′, Fab′-SH, F(ab′)₂; diabodies; linear antibodies; single-chain antibody molecules (e.g., scFv); and multispecific antibodies formed from antibody fragments.

[0120] An “antibody that binds to the same epitope” as a reference antibody refers to an antibody that blocks binding of the reference antibody to its antigen in a competition assay, and/or conversely, the reference antibody blocks binding of the antibody to its antigen in a competition assay. An exemplary competition assay is provided herein.

[0121] The term “chimeric” antibody refers to an antibody in which a portion of the heavy and/or light chain is derived from a particular source or species, while the remainder of the heavy and/or light chain is derived from a different source or species.

[0122] The “class” of an antibody refers to the type of constant domain or constant region possessed by its heavy chain. There are five major classes of antibodies: IgA, IgD, IgE, IgG, and IgM, and several of these may be further divided into subclasses (isotypes), e.g., IgG₁, IgG₂, IgG₃, IgG₄, IgA₁, and IgA₂. The heavy chain constant domains that correspond to the different classes of immunoglobulins are called α, δ, ε, γ, and μ, respectively.

[0123] The term “cytotoxic agent” as used herein refers to a substance that inhibits or prevents a cellular function and/or causes cell death or destruction. Cytotoxic agents include, but are not limited to, radioactive isotopes (e.g., At²¹¹, I¹³¹, I¹²⁵, Y⁹⁰, Re¹⁸⁶, Re¹⁸⁸, Sm¹⁵³, Bi²¹², P³², Pb²¹² and radioactive isotopes of Lu); chemotherapeutic agents or drugs (e.g., methotrexate, adriamycin, vinca alkaloids (vincristine, vinblastine, etoposide), doxorubicin, melphalan, mitomycin C, chlorambucil, daunorubicin or other intercalating agents); growth inhibitory agents; enzymes and fragments thereof such as nucleolytic enzymes; antibiotics; toxins such as small molecule toxins or enzymatically active toxins of bacterial, fungal, plant or animal origin, including fragments and/or variants thereof; and the various antitumor or anticancer agents disclosed below.

[0124] “Effector functions” refer to those biological activities attributable to the Fc region of an antibody, which vary with the antibody isotype. Examples of antibody effector functions include: C1q binding and complement dependent cytotoxicity (CDC); Fc receptor binding; antibody-dependent cell-mediated cytotoxicity (ADCC); phagocytosis; down regulation of cell surface receptors (e.g., B cell receptor); and B cell activation.

[0125] An “effective amount” of an agent, e.g., a pharmaceutical formulation, refers to an amount effective, at dosages and for periods of time necessary, to achieve the desired therapeutic or prophylactic result.

[0126] The term “epitope” includes any determinant capable of being bound by an antibody. An epitope is a region of an antigen that is bound by an antibody that targets that antigen, and includes specific amino acids that directly contact the antibody. Epitope determinants can include chemically active surface groupings of molecules such as amino acids, sugar side chains, phosphoryl or sulfonyl groups, and can have specific three dimensional structural characteristics, and/or specific charge characteristics. Generally, antibodies specific for a particular target antigen will preferentially recognize an epitope on the target antigen in a complex mixture of proteins and/or macromolecules.

[0127] “Fc receptor” or “FcR” describes a receptor that binds to the Fc region of an antibody. In some embodiments, an FcR is a native human FcR. In some embodiments, an FcR is one which binds an IgG antibody (a gamma receptor) and includes receptors of the FcγRI, FcγRII, and FcγRIII subclasses, including allelic variants and alternatively spliced forms of those receptors. FcγRII receptors include FcγRIIA (an “activating receptor”) and FcγRIIB (an “inhibiting receptor”), which have similar amino acid sequences that differ primarily in the cytoplasmic domains thereof. Activating receptor FcγRIIA contains an immunoreceptor tyrosine-based activation motif (ITAM) in its cytoplasmic domain. Inhibiting receptor FcγRIIB contains an immunoreceptor tyrosine-based inhibition motif (ITIM) in its cytoplasmic domain. (See, e.g., Da\check{e}ron, Annu. Rev. Immunol. 15:203-234 (1997).) FcRs are reviewed, for example, in Ravetch and Kinet, Annu. Rev. Immunol. 9:457-92 (1991); Capel et al., Immunomethods 4:25-34 (1994); and de Haas et al., J. Lab. Clin. Med. 126:330-41 (1995). Other FcRs, including those to be identified in the future, are encompassed by the term “FcR” herein.

[0128] The term “Fc receptor” or “FcR” also includes the neonatal receptor, FcRn, which is responsible for the transfer of maternal IgGs to the fetus (Guyer et al., J. Immunol. 117:587 (1976) and Kim et al., J. Immunol. 24:249 (1994)) and regulation of homeostasis of immunoglobulins. Methods of measuring binding to FcRn are known (see, e.g., Ghetie and Ward., Immunol. Today 18(12):592-598 (1997); Ghetie et al., Nature Biotechnology 15(7):637-640 (1997); Hinton et al., J. Biol. Chem. 279(8):6213-6216 (2004); WO 2004/92219 (Hinton et al.). Binding to human FcRn in vivo and serum half life of human FcRn high affinity binding polypeptides can be assayed, e.g., in transgenic mice or transfected human cell lines expressing human FcRn, or in primates to which the polypeptides with a variant Fc region are administered. WO 2000/42072 (Presta) describes antibody variants with improved or diminished binding to FcRs. See also, e.g., Shields et al., J. Biol. Chem. 9(2):6591-6604 (2001).

[0129] The term “Fc region” herein is used to define a C-terminal region of an immunoglobulin heavy chain that contains at least a portion of the constant region. The term includes native sequence Fc regions and variant Fc regions. In one embodiment, a human IgG heavy chain Fc region extends from Cys226, or from Pro230, to the carboxyl-terminus of the heavy chain. However, the C-terminal lysine (Lys447) of the Fc region may or may not be present. Unless otherwise specified herein, numbering of amino acid residues in the Fc region or constant region is according to the EU numbering system, also called the EU index, as described in Kabat et al., Sequences of Proteins of Immunological Interest, 5th Ed. Public Health Service, National Institutes of Health, Bethesda, Md., 1991.

[0130] The term “Fc region-comprising antibody” refers to an antibody that comprises an Fc region. The C-terminal lysine (residue 447 according to the EU numbering system) of the Fc region may be removed, for example, during purification of the antibody or by recombinant engineering of the nucleic acid encoding the antibody. Accordingly, a composition comprising an antibody having an Fc region according to this invention can comprise an antibody with K447, with all K447 removed, or a mixture of antibodies with and without the K447 residue.

[0131] “Framework” or “FR” refers to variable domain residues other than hypervariable region (HVR) residues. The FR of a variable domain generally consists of four FR domains: FR1, FR2, FR3, and FR4. Accordingly, the HVR and FR sequences generally appear in the following sequence in VH (or VL): FR1-H1(L1)-FR2-H2(L2)-FR3-H3(L3)-FR4.

[0132] The terms “full length antibody,” “intact antibody,” and “whole antibody” are used herein interchangeably to refer to an antibody having a structure substantially similar to a native antibody structure or having heavy chains that contain an Fc region as defined herein.

[0133] A “functional Fc region” possesses an “effector function” of a native sequence Fe region. Exemplary “effector functions” include C1q binding; CDC; Fc receptor binding; ADCC; phagocytosis; down regulation of cell surface receptors (e.g., B cell receptor; BCR), etc. Such effector functions generally require the Fc region to be combined with a binding domain (e.g., an antibody variable domain) and can be assessed using various assays as disclosed, for example, in definitions herein.

[0134] The terms “host cell,” “host cell line,” and “host cell culture” are used interchangeably and refer to cells into which exogenous nucleic acid has been introduced, including the progeny of such cells. Host cells include “transformants” and “transformed cells,” which include the primary transformed cell and progeny derived therefrom without regard to the number of passages. Progeny may not be completely identical in nucleic acid content to a parent cell, but may contain mutations. Mutant progeny that have the same function or biological activity as screened or selected for in the originally transformed cell are included herein.

[0135] A “human antibody” is one which possesses an amino acid sequence which corresponds to that of an antibody produced by a human or a human cell or derived from a non-human source that utilizes human antibody repertoires or other human antibody-encoding sequences. This definition of a human antibody specifically excludes a humanized antibody comprising non-human antigen-binding residues.

[0136] A “human consensus framework” is a framework which represents the most commonly occurring amino acid residues in a selection of human immunoglobulin VL or VH framework sequences. Generally, the selection of human immunoglobulin VL or VH sequences is from a subgroup of variable domain sequences. Generally, the subgroup of sequences is a subgroup as in Kabat et al., Sequences of Proteins of Immunological Interest, Fifth Edition, NIH Publication 91-3242, Bethesda Md. (1991), vols. 1-3, which is herein incorporated by reference in its entirety. In one embodiment, for the VL, the subgroup is subgroup kappa I as in Kabat et al., supra. In one embodiment, for the VH, the subgroup is subgroup III as in Kabat et al., supra.

[0137] A “humanized” antibody refers to a chimeric antibody comprising amino acid residues from non-human HVRs and amino acid residues from human FRs. In certain embodiments, a humanized antibody will comprise substantially all of at least one, and typically two, variable domains, in which all or substantially all of the HVRs (e.g., CDRs) correspond to those of a non-human antibody, and all or substantially all of the FRs correspond to those of a human antibody. A humanized antibody optionally may comprise at least a portion of an antibody constant region derived from a human antibody. A “humanized form” of an antibody, e.g., a non-human antibody, refers to an antibody that has undergone humanization.

[0138] The term “hypervariable region” or “HVR” as used herein refers to each of the regions of an antibody variable domain which are hypervariable in sequence (“complementarity determining regions” or “CDRs”) and/or form structurally defined loops (“hypervariable loops”) and/or contain the antigen-contacting residues (“antigen contacts”). Generally, antibodies comprise six HVRs: three in the VH (H1, H2, H3), and three in the VL (L1, L2, L3). Exemplary HVRs herein include: (a) hypervariable loops occurring at amino acid residues 26-32 (L1), 50-52 (L2), 91-96 (L3), 26-32 (H1), 53-55 (H2), and 96-101 (H3) (Chothia and Lesk, J. Mol. Biol. 196:901-917 (1987)); (b) CDRs occurring at amino acid residues 24-34 (L1), 50-56 (L2), 89-97 (L3), 31-35b (H1), 50-65 (H2), and 95-102 (H3) (Kabat et al., Sequences of Proteins of Immunological Interest, 5th Ed. Public Health Service, NIH, Bethesda, Md. (1991)); (c) antigen contacts occurring at amino acid residues 27c-36 (L1), 46-55 (L2), 89-96 (L3), 30-35b (H1), 47-58 (H2), and 93-101 (H3) (MacCallum et al., J. Mol. Biol. 262: 732-745 (1996)); and (d) combinations of (a), (b), and/or (c), including HVR amino acid residues 46-56 (L2), 47-56 (L2), 48-56 (L2), 49-56 (L2), 26-35 (H1), 26-35b (H1), 49-65 (H2), 93-102 (H3), and 94-102 (H3).

[0139] Unless otherwise indicated, HVR residues and other residues in the variable domain (e.g., FR residues) are numbered herein according to Kabat et al., supra.

[0140] An “immunoconjugate” is an antibody conjugated to one or more heterologous molecule(s), including but not limited to a cytotoxic agent.

[0141] An “individual” or “subject” is a mammal. Mammals include, but are not limited to, domesticated animals (e.g., cows, sheep, cats, dogs, and horses), primates (e.g., humans and non-human primates such as monkeys), rabbits, and rodents (e.g., mice and rats). In certain embodiments, the individual or subject is a human.

[0142] An “isolated” antibody is one which has been separated from a component of its natural environment. In some embodiments, an antibody is purified to greater than 95% or 99% purity as determined by, for example, electrophoretic (e.g., SDS-PAGE, isoelectric focusing (IEF), capillary electrophoresis) or chromatographic (e.g., ion exchange or reverse phase HPLC). For review of methods for assessment of antibody purity, see, e.g., Flatman et al., J. Chrornatogr. B 848:79-87 (2007).

[0143] An “isolated” nucleic acid refers to a nucleic acid molecule that has been separated from a component of its natural environment. An isolated nucleic acid includes a nucleic acid molecule contained in cells that ordinarily contain the nucleic acid molecule, but the nucleic acid molecule is present extrachromosomally or at a chromosomal location that is different from its natural chromosomal location.

[0144] “Isolated nucleic acid encoding an anti-myostatin antibody” refers to one or more nucleic acid molecules encoding antibody heavy and light chains (or fragments thereof), including such nucleic acid molecule(s) in a single vector or separate vectors, and such nucleic acid molecule(s) present at one or more locations in a host cell.

[0145] The term “monoclonal antibody” as used herein refers to an antibody obtained from a population of substantially homogeneous antibodies, i.e., the individual antibodies comprising the population are identical and/or bind the same epitope, except for possible variant antibodies, e.g., containing naturally occurring mutations or arising during production of a monoclonal antibody preparation, such variants generally being present in minor amounts. In contrast to polyclonal antibody preparations, which typically include different antibodies directed against different determinants (epitopes), each monoclonal antibody of a monoclonal antibody preparation is directed against a single determinant on an antigen. Thus, the modifier “monoclonal” indicates the character of the antibody as being obtained from a substantially homogeneous population of antibodies, and is not to be construed as requiring production of the antibody by any particular method. For example, the monoclonal antibodies to be used in accordance with the present invention may be made by a variety of techniques, including but not limited to the hybridoma method, recombinant DNA methods, phage-display methods, and methods utilizing transgenic animals containing all or part of the human immunoglobulin loci, such methods and other exemplary methods for making monoclonal antibodies being described herein.

[0146] A “naked antibody” refers to an antibody that is not conjugated to a heterologous moiety (e.g., a cytotoxic moiety) or radiolabel. The naked antibody may be present in a pharmaceutical formulation.

[0147] “Native antibodies” refer to naturally occurring immunoglobulin molecules with varying structures. For example, native IgG antibodies are heterotetrameric glycoproteins of about 150,000 daltons, composed of two identical light chains and two identical heavy chains that are disulfide-bonded. From N- to C-terminus, each heavy chain has a variable region (VII), also called a variable heavy domain or a heavy chain variable domain, followed by three constant domains (CH1, CH2, and CH3). Similarly, from N- to C-terminus, each light chain has a variable region (VL), also called a variable light domain or a light chain variable domain, followed by a constant light (CL) domain. The light chain of an antibody may be assigned to one of two types, called kappa (κ) and lambda (λ), based on the amino acid sequence of its constant domain.

[0148] A “native sequence Fc region” comprises an amino acid sequence identical to the amino acid sequence of an Fc region found in nature. Native sequence human Fc regions include a native sequence human IgG1 Fc region (non-A and A allotypes); native sequence human IgG2 Fc region; native sequence human IgG3 Fc region; and native sequence human IgG4 Fc region as well as naturally occurring variants thereof.

[0149] The term “package insert” is used to refer to instructions customarily included in commercial packages of therapeutic products, that contain information about the indications, usage, dosage, administration, combination therapy, contraindications and/or warnings concerning the use of such therapeutic products.

[0150] “Percent (%) amino acid sequence identity” with respect to a reference polypeptide sequence is defined as the percentage of amino acid residues in a candidate sequence that are identical with the amino acid residues in the reference polypeptide sequence, after aligning the sequences and introducing gaps, if necessary, to achieve the maximum percent sequence identity, and not considering any conservative substitutions as part of the sequence identity. Alignment for purposes of determining percent amino acid sequence identity can be achieved in various ways that are within the skill in the art, for instance, using publicly available computer software such as BLAST, BLAST-2, ALIGN or Megalign (DNASTAR) software. Those skilled in the art can determine appropriate parameters for aligning sequences, including any algorithms needed to achieve maximal alignment over the full length of the sequences being compared. For purposes herein, however, % amino acid sequence identity values are generated using the sequence comparison computer program ALIGN-2. The ALIGN-2 sequence comparison computer program was authored by Genentech, Inc., and the source code has been filed with user documentation in the US Copyright Office, Washington D.C., 20559, where it is registered under US Copyright Registration No. TXU510087. The ALIGN-2 program is publicly available from Genentech, Inc., South San Francisco, Calif., or may be compiled from the source code. The ALIGN-2 program should be compiled for use on a UNIX operating system, including digital UNIX V4.0D. All sequence comparison parameters are set by the ALIGN-2 program and do not vary.

[0151] In situations where ALIGN-2 is employed for amino acid sequence comparisons, the % amino acid sequence identity of a given amino acid sequence A to, with, or against a given amino acid sequence B (which can alternatively be phrased as a given amino acid sequence A that has or comprises a certain % amino acid sequence identity to, with, or against a given amino acid sequence B) is calculated as follows: 100 times the fraction X/Y; where X is the number of amino acid residues scored as identical matches by the sequence alignment program ALIGN-2 in that program's alignment of A and B, and where Y is the total number of amino acid residues in B. It will be appreciated that where the length of amino acid sequence A is not equal to the length of amino acid sequence B, the % amino acid sequence identity of A to B will not equal the % amino acid sequence identity of B to A. Unless specifically stated otherwise, all % amino acid sequence identity values used herein are obtained as described in the immediately preceding paragraph using the ALIGN-2 computer program.

[0152] The term “pharmaceutical formulation” refers to a preparation which is in such form as to permit the biological activity of an active ingredient contained therein to be effective, and which contains no additional components which are unacceptably toxic to a subject to which the formulation would be administered.

[0153] A “pharmaceutically acceptable carrier” refers to an ingredient in a pharmaceutical formulation, other than an active ingredient, which is nontoxic to a subject. A pharmaceutically acceptable carrier includes, but is not limited to, a buffer, excipient, stabilizer, or preservative.

[0154] The term “myostatin”, as used herein, may refer to any native myostatin from any vertebrate source, including mammals such as primates (e.g., humans) and rodents (e.g., mice and rats). Unless otherwise indicated, the term “myostatin” refers to a human myostatin protein having the amino acid sequence shown in SEQ ID NO: 1 and containing the terminal propeptide domain of human myostatin as shown in SEQ ID NO: 75 or 78. The term encompasses “full-length”, unprocessed myostatin as well as any form of myostatin that results from processing in the cell. The term also encompasses naturally occurring variants of myostatin, e.g., splice variants or allelic variants. The amino acid sequence of an exemplary human myostatin (promyostatin) is shown in SEQ ID NO: 1. The amino acid sequence of an exemplary C-terminal growth factor domain of human myostatin is shown in SEQ ID NO: 2. The amino acid sequence of an exemplary N-terminal propeptide domain of human myostatin is shown in SEQ ID NO: 75 or 78. Active mature myostatin is a disulfide-bonded homodimer consisting of two C-terminal growth factor domains. Inactive latent myostatin is a noncovalently-associated complex of two propeptides and the mature myostatin. As disclosed herein, the antibodies of the invention bind inactive latent myostatin, but do not bind the mature active myostatin homodimer. In some embodiments, the antibodies of the invention bind an epitope within a fragment consisting of amino acids 21-100 of myostatin propeptide (SEQ ID NO:78), but do not bind the mature active myostatin homodimer. The amino acid sequence of an exemplary cynomolgus monkey and murine myostatin (promyostatin) are shown in SEQ ID NO: 3 and 5, respectively. The amino acid sequence of an exemplary C-terminal growth factor domain of cynomolgus monkey and murine myostatin are shown in SEQ ID NO: 4 and 6, respectively. The amino acid sequence of an exemplary N-terminal propeptide domain of cynomolgus monkey and murine myostatin are shown in SEQ ID NO: 76 or 79, and 77 or 80, respectively. GDF-11 (BMP-11) is a closely related molecule to myostatin, both of which are members of TGF-β superfamily. Similarly to myostatin, GDF11 is synthesized as a precursor polypeptide first, and then cleaved into an N-terminal prodomain and C-terminal mature GDF11. The amino acid sequence of human GDF11 (precursor) is shown in SEQ ID NO: 81. The amino acid sequence of C-terminal mature human GDF11 is shown in SEQ ID NO: 82. The amino acid sequence of an N-terminal prodomain of human GDF11 is shown in SEQ ID NO: 83 or 84. Amino acid sequences of SEQ ID NOs: 1, 3, 5, 78, 79, 80, 81, and 84, include a signal sequence. Amino acids 1-24 of these sequences correspond to the signal sequence that is removed during processing in the cell.

[0155] As used herein, “treatment” (and grammatical variations thereof such as “treat” or “treating”) refers to clinical intervention in an attempt to alter the natural course of the individual being treated, and can be performed either for prophylaxis or during the course of clinical pathology. Desirable effects of treatment include, but are not limited to, preventing occurrence or recurrence of disease, alleviation of symptoms, diminishment of any direct or indirect pathological consequences of the disease, preventing metastasis, decreasing the rate of disease progression, amelioration or palliation of the disease state, and remission or improved prognosis. In some embodiments, antibodies of the invention are used to delay development of a disease or to slow the progression of a disease.

[0156] The term “variable region” or “variable domain” refers to the domain of an antibody heavy or light chain that is involved in binding the antibody to antigen. The variable domains of the heavy chain and light chain (VH and VL, respectively) of a native antibody generally have similar structures, with each domain comprising four conserved framework regions (FRs) and three hypervariable regions (HVRs). (See, e.g., Kindt et al., Kuby Immunology, 6^{th} ed., W.H. Freeman and Co., page 91 (2007).) A single VH or VL domain may be sufficient to confer antigen-binding specificity. Furthermore, antibodies that bind a particular antigen may be isolated using a VH or VL domain from an antibody that binds the antigen to screen a library of complementary VL or VH domains, respectively. See, e.g., Portolano et al., J. Immunol. 150:880-887 (1993); Clarkson et al., Nature 352:624-628 (1991).

[0157] A “variant Fc region” comprises an amino acid sequence which differs from that of a native sequence Fc region by virtue of at least one amino acid modification (alteration), preferably one or more amino acid substitution(s). Preferably, the variant Fc region has at least one amino acid substitution compared to a native sequence Fc region or to the Fc region of a parent polypeptide, e.g., from about one to about ten amino acid substitutions, and preferably from about one to about five amino acid substitutions in a native sequence Fc region or in the Fc region of the parent polypeptide. The variant Fc region herein will preferably possess at least about 80% homology with a native sequence Fc region and/or with an Fc region of a parent polypeptide, and most preferably at least about 90% homology therewith, more preferably at least about 95% homology therewith.

[0158] The term “vector,” as used herein, refers to a nucleic acid molecule capable of propagating another nucleic acid to which it is linked. The term includes the vector as a self-replicating nucleic acid structure as well as the vector incorporated into the genome of a host cell into which it has been introduced. Certain vectors are capable of directing the expression of nucleic acids to which they are operatively linked. Such vectors are referred to herein as “expression vectors”.

### II. COMPOSITIONS AND METHODS

[0159] In one aspect, the invention is based, in part, on anti-myostatin antibodies and uses thereof. In certain embodiments, antibodies that bind to myostatin are provided. Antibodies of the invention are useful, e.g., for the diagnosis or treatment of a muscle wasting disease.

[0160] In another aspect, the invention is based, in part, on polypeptides comprising variant Fc regions and uses thereof. In one embodiment, polypeptides comprising variant Fc regions with enhanced FcγRIIb-binding activity are provided. In another embodiment, polypeptides comprising variant Fc regions with increased pI are provided. In particular embodiments, the polypeptides of the invention are antibodies. Polypeptides comprising a variant Fc region of the invention are useful, e.g., for the diagnosis or treatment of diseases.

[0161] A. Exemplary Anti-Myostatin Antibodies and Polypeptides Comprising Variant Fc Regions

[0162] In one aspect, the invention provides isolated antibodies that bind to myostatin. In certain embodiments, an anti-myostatin antibody of the present invention binds to latent myostatin. In further embodiments, an anti-myostatin antibody of the present invention binds to the myostatin propeptide (human: SEQ ID NO: 75 or 78; cynomolgus monkey: SEQ ID NO: 76 or 79; mouse: SEQ ID NO: 77 or 80). In further embodiments, the antibody binds to an epitope within a fragment consisting of amino acids 21-100 of myostatin propeptide (SEQ ID NO: 78). Propeptide is contained in latent myostatin as one of the components, as described above. In certain embodiments, an anti-myostatin antibody of the present invention inhibits activation of myostatin. In certain embodiments, the anti-myostatin antibody blocks the release of mature myostatin from latent myostatin. It has been reported that mature myostatin is released via proteolytic and non-proteolytic processes from latent myostatin. The anti-myostatin antibody of the present invention may block the proteolytic and/or non-proteolytic release of mature myostatin from latent myostatin. In certain embodiments, the anti-myostatin antibody blocks the proteolytic cleavage of latent myostatin. In certain embodiments, the anti-myostatin antibody blocks access of a protease to latent myostatin (especially, to the proteolytic cleavage site (Arg98-Asp99) of latent myostatin). In further embodiments, the protease may be a BMP1/TLD family metalloprotease such as BMP1, TED, tolloid-like protein-1 (TLL-1), or tolloid-like protein-2 (TLL-2). In another embodiment, the anti-myostatin antibody blocks the non-proteolytic release of mature myostatin from latent myostatin. The non-proteolytic release as used herein means a spontaneous release of mature myostatin from latent myostatin, which is not accompanied by the proteolytic cleavage of latent myostatin. The non-proteolytic release includes, for example, a release of mature myostatin by incubating latent myostatin e.g., at 37° C. in the absence of a protease that cleaves the latent myostatin. In certain embodiments, the anti-myostatin antibody of the present invention does not bind to mature myostatin. In some embodiments, the anti-myostatin antibody binds to the same epitope as an antibody described in Table 2a. In some embodiments, the anti-myostatin antibody competes for binding latent myostatin with an antibody described in Table 2a. In additional embodiments, an anti-myostatin antibody competes for binding latent myostatin with an antibody comprising a VH and VL pair described in Table 2a. In some embodiments, the anti-myostatin antibody competes for binding a fragment consisting of amino acids 21-100 of myostatin propeptide (SEQ ID NO: 78) with an antibody described in Table 2a. In further embodiments, the anti-myostatin antibody binds to the same epitope as an antibody described in Table 11a or 13. In some embodiments, the anti-myostatin antibody competes for binding latent myostatin with an antibody described in Table 11a or 13. In some embodiments, the anti-myostatin antibody competes for binding a fragment consisting of amino acids 21-100 of myostatin propeptide (SEQ ID NO: 78) with an antibody described in Table 11a or 13.

[0163] In some embodiments, an anti-myostatin antibody of the present invention binds to latent myostatin and inhibits the activation of myostatin. In further embodiments, the antibody: (a) blocks the release of mature myostatin from latent myostatin; (b) blocks the proteolytic release of mature myostatin; (c) blocks the spontaneous release of mature myostatin; or (d) does not bind to mature myostatin; or (e) binds to an epitope within a fragment consisting of amino acids 21-100 of myostatin propeptide (SEQ ID NO: 78). In further embodiments, the antibody competes for binding latent myostatin with, or binds the same epitope as, an antibody comprising a VH and VL pair described in Tables 2a, 11a, or 13. In further embodiments, the antibody binds to latent myostatin with higher affinity at neutral pH (e.g., pH7.4) than at acidic pH (e.g., pH5.8). In further embodiments, the antibody is (a) a monoclonal antibody, (b) a human, humanized, or chimeric antibody; (c) a full length IgG antibody or (d) an antibody fragment that binds to latent myostatin or myostatin propeptide.

[0164] In another embodiment, an anti-myostatin antibody of the present invention does not bind to GDF11. In certain embodiments, an anti-myostatin antibody of the present invention does not inhibit activation of GDF11. In certain embodiments, the anti-myostatin antibody does not block the release of mature GDF11 from latent GDF11. The anti-myostatin antibody of the present invention does not block either proteolytic or non-proteolytic release of mature GDF11 from latent GDF11. In certain embodiments, the anti-myostatin antibody does not block the proteolytic cleavage of latent GDF11. In certain embodiments, the anti-myostatin antibody does not block access of a protease to latent GDF11 (especially, to the proteolytic cleavage site of latent GDF11). In further embodiments, the protease may be a BMP1/TLD family metalloprotease such as BMP1, TED, tolloid-like protein-1 (TLL-1), or tolloid-like protein-2 (TLL-2). The non-proteolytic release as used herein means a spontaneous release of mature GDF11 from latent GDF11, which is not accompanied by the proteolytic cleavage of latent GDF11. The non-proteolytic release includes, for example, a release of mature GDF11 by incubating latent GDF11 e.g., at 37° C. in the absence of a protease that cleaves the latent GDF11. Most of the anti-myostatin antibodies known to date were not specific for myostatin. These antibodies have high affinity for other members of the TGF-β superfamily, such as GDF11 and neutralize the biological activities of them. GDF11 plays an important role during embryogenesis, and is responsible for homeotic transformation of the axial skeleton. Homozygous GDF11 knockout mice are perinatal lethal, mice with one wild type copy of the GDF11 gene are viable but have skeletal defects. Since GDF11 plays an important role during embryogenesis, an antagonist that inhibits GDF11 poses theoretical safety risks that could present either as toxicity in treated patients or as reproductive toxicity in, e.g., women of childbearing potential. Thus, there is a need for specific inhibition of myostatin activity in treatments of myostatin-associated disorders for which it is desirable to increase muscle mass, size, strength, etc., particularly in women with childbearing potential.

[0165] In another aspect, the invention provides anti-myostatin antibodies that exhibit pH-dependent binding characteristics. As used herein, the expression “pH-dependent binding” means that the antibody exhibits “reduced binding to myostatin at acidic pH as compared to its binding at neutral pH” (for purposes of the present disclosure, both expressions may be used interchangeably). For example, antibodies “with pH-dependent binding characteristics” include antibodies that bind to myostatin with higher affinity at neutral pH than at acidic pH. In certain embodiments, the antibodies of the present invention bind to myostatin with at least 2, 3, 5, 10, 15, 20, 25, 30, 35, 40, 45, 50, 55, 60, 65, 70, 75, 80, 85, 90, 95, 100, 200, 400, 1000, 10000, or more times higher affinity at neutral pH than at acidic pH. In some embodiments, the antibodies bind to myostatin (e.g., latent myostatin or propeptide myostatin) with higher affinity at pH7.4 than at pH5.8. In further embodiments, the antibodies bind to myostatin with at least 2, 3, 5, 10, 15, 20, 25, 30, 35, 40, 45, 50, 55, 60, 65, 70, 75, 80, 85, 90, 95, 100, 200, 400, 1000, 10000, or more times higher affinity at pH7.4 than at pH5.8.

[0166] When an antigen is a soluble protein, the binding of an antibody to the antigen can result in an extended half-life of the antigen in plasma (i.e., reduced clearance of the antigen from plasma), since the antibody can have a longer half-life in plasma than the antigen itself and may serve as a carrier for the antigen. This is due to the recycling of the antigen-antibody complex by FcRn through the endosomal pathway in cell (Roopenian, Nat. Rev. Immunol. 7(9): 715-725 (2007)). However, an antibody with pH-dependent binding characteristics, which binds to its antigen in neutral extracellular environment while releasing the antigen into acidic endosomal compartments following its entry into cells, is expected to have superior properties in terms of antigen neutralization and clearance relative to its counterpart that binds in a pH-independent manner (Igawa et al., Nature Biotechnol. 28(11):1203-1207 (2010); Devanaboyina et al., mAbs 5(6):851-859 (2013); WO 2009/125825).

[0167] The “affinity” of an antibody for myostatin, for purposes of the present disclosure, is expressed in terms of the KD of the antibody. The KD of an antibody refers to the equilibrium dissociation constant of an antibody-antigen interaction. The greater the KD value is for an antibody binding to its antigen, the weaker its binding affinity is for that particular antigen. Accordingly, as used herein, the expression “higher affinity at neutral pH than at acidic pH” (or the equivalent expression “pH-dependent binding”) means that the KD of the antibody binding to myostatin at acidic pH is greater than the KD of the antibody binding to myostatin at neutral pH. For example, in the context of the present invention, an antibody is considered to bind to myostatin with higher affinity at neutral pH than at acidic pH if the KD of the antibody binding to myostatin at acidic pH is at least 2 times greater than the KD of the antibody binding to myostatin at neutral pH. Thus, the present invention includes antibodies that bind to myostatin at acidic pH with a KD that is at least 2, 3, 5, 10, 15, 20, 25, 30, 35, 40, 45, 50, 55, 60, 65, 70, 75, 80, 85, 90, 95, 100, 200, 400, 1000, 10000, or more times greater than the KD of the antibody binding to myostatin at neutral pH. In another embodiment, the KD value of the antibody at neutral pH can be 10⁻⁷ M, 10⁻⁸ M, 10⁻⁹ M, 10⁻¹⁰ M, 10⁻¹¹ M, 10⁻¹² M, or less. In another embodiment, the KD value of the antibody at acidic pH can be 10⁻⁹ M, 10⁻⁸ M, 10⁻⁷ M, 10⁻⁶ M, or greater.

[0168] In further embodiments an antibody is considered to bind to myostatin (e.g., latent myostatin or propeptide myostatin) with a higher affinity at neutral pH than at acidic pH if the KD of the antibody binding to myostatin at pH5.8 is at least 2 times greater than the KD of the antibody binding to myostatin at pH7.4. In some embodiments the provided antibodies bind to myostatin at pH5.8 with a KD that is at least 3, 5, 10, 15, 20, 25, 30, 35, 40, 45, 50, 55, 60, 65, 70, 75, 80, 85, 90, 95, 100, 200, 400, 1000, 10000, or more times greater than the KD of the antibody binding to myostatin at pH7.4. In another embodiment, the KD value of the antibody at pH7.4 can be 10⁻⁷ M, 10⁻⁸ M, 10⁻⁹ M, 10⁻¹⁰ M, 10⁻¹¹ M, 10⁻¹² M, or less. In another embodiment, the KD value of the antibody at pH5.8 can be 10⁻⁹ M, 10⁻⁸ M, 10⁻⁷ M, 10⁻⁶ M, or greater.

[0169] The binding properties of an antibody for a particular antigen may also be expressed in terms of the kd of the antibody. The kd of an antibody refers to the dissociation rate constant of the antibody with respect to a particular antigen and is expressed in terms of reciprocal seconds (i.e., sec⁻¹). An increase in kd value signifies weaker binding of an antibody to its antigen. The present invention therefore includes antibodies that bind to myostatin with a higher kd value at acidic pH than at neutral pH. The present invention includes antibodies that bind to myostatin at acidic pH with a kd that is at least 2, 3, 5, 10, 15, 20, 25, 30, 35, 40, 45, 50, 55, 60, 65, 70, 75, 80, 85, 90, 95, 100, 200, 400, 1000, 10000, or more times greater than the kd of the antibody binding to myostatin at neutral pH. In another embodiment, the kd value of the antibody at neutral pH can be 10⁻² l/s, 10⁻³ l/s, 10⁻⁴ l/s, 10⁻⁵ l/s, 10⁻⁶ l/s, or less. In another embodiment, the kd value of the antibody at acidic pH can be 10⁻³ l/s, 10⁻² l/s, 10⁻¹ l/s, or greater. The invention also includes antibodies that bind to myostatin (e.g., latent myostatin or propeptide myostatin) with a higher kd value at pH5.8 than at pH7.4. The invention includes antibodies that bind to myostatin at pH5.8 with a kd that is at least 3, 5, 10, 15, 20, 25, 30, 35, 40, 45, 50, 55, 60, 65, 70, 75, 80, 85, 90, 95, 100, 200, 400, 1000, 10000, or more times greater than the kd of the antibody binding to myostatin at pH7.4. In another embodiment, the kd value of the antibody at pH7.4 can be 10⁻² l/s, 10⁻³ l/s, 10⁻⁴ l/s, 10⁻⁵ l/s, 10⁻⁶ l/s, or less. In another embodiment, the kd value of the antibody at pH5.8 can be 10⁻³ l/s, 10⁻² l/s, 10⁻¹ l/s, or greater.

[0170] In certain instances, a “reduced binding to myostatin at acidic pH as compared to its binding at neutral pH” is expressed in terms of the ratio of the KD value of the antibody binding to myostatin at acidic pH to the KD value of the antibody binding to myostatin at neutral pH (or vice versa). For example, an antibody may be regarded as exhibiting “reduced binding to myostatin at acidic pH as compared to its binding at neutral pH”, for purposes of the present invention, if the antibody exhibits an acidic/neutral KD ratio of 2 or greater. In certain embodiments, the pH5.8/pH7.4 KD ratio for an anti-myostatin antibody of the present invention is 2 or greater. In certain exemplary embodiments, the acidic/neutral KD ratio for an antibody of the present invention can be 2, 3, 5, 10, 15, 20, 25, 30, 35, 40, 45, 50, 55, 60, 65, 70, 75, 80, 85, 90, 95, 100, 200, 400, 1000, 10000, or greater. In another embodiment, the KD value of the antibody at neutral pH can be 10⁻⁷ M, 10⁻⁸ M, 10⁻⁹ M, 10⁻¹⁰ M, 10⁻¹¹ M, 10⁻¹² M, or less. In another embodiment, the KD value of the antibody at acidic pH can be 10⁻⁹ M, 10⁻⁸ M, 10⁻⁷ M, 10⁻⁶ M, or greater. In further instances an antibody may be regarded as exhibiting “reduced binding to myostatin (e.g., latent myostatin) at acidic pH as compared to its binding at neutral pH”, if the antibody exhibits an pH5.8/pH7.4 KD ratio of 2 or greater. In certain exemplary embodiments, the pH5.8/pH7.4 KD ratio for the antibody can be 3, 5, 10, 15, 20, 25, 30, 35, 40, 45, 50, 55, 60, 65, 70, 75, 80, 85, 90, 95, 100, 200, 400, 1000, 10000, or greater. In another embodiment, the KD value of the antibody at pH7.4 can be 10⁻⁷ M, 10⁻⁸ M, 10⁻⁹ M, 10⁻¹⁰ M, 10⁻¹¹ M, 10⁻¹² M, or less. In another embodiment, the KD value of the antibody at pH5.8 can be 10⁻⁹ M, 10⁻⁸ M, 10⁻⁷ M, 10⁻⁶ M, or greater.

[0171] In certain instances, a “reduced binding to myostatin at acidic pH as compared to its binding at neutral pH” is expressed in terms of the ratio of the kd value of the antibody binding to myostatin at acidic pH to the kd value of the antibody binding to myostatin at neutral pH (or vice versa). For example, an antibody may be regarded as exhibiting “reduced binding to myostatin at acidic pH as compared to its binding at neutral pH”, for purposes of the present invention, if the antibody exhibits an acidic/neutral kd ratio of 2 or greater. In certain exemplary embodiments, the pH5.8/pH7.4 kd ratio for an antibody of the present invention is 2 or greater. In certain exemplary embodiments, the acidic/neutral kd ratio for an antibody of the present invention can be 2, 3, 5, 10, 15, 20, 25, 30, 35, 40, 45, 50, 55, 60, 65, 70, 75, 80, 85, 90, 95, 100, 200, 400, 1000, 10000, or greater. In another embodiment, the kd value of the antibody at neutral pH can be 10⁻² l/s, 10⁻³ l/s, 10⁻⁴ l/s, 10⁻⁵ l/s, 10⁻⁶ l/s, or less. In another embodiment, the kd value of the antibody at acidic pH can be 10⁻³ l/s, 10⁻² l/s, 10⁻¹ l/s, or greater. In certain exemplary embodiments, the pH5.8/pH7.4 kd ratio for an antibody of the present invention can be 2, 3, 5, 10, 15, 20, 25, 30, 35, 40, 45, 50, 55, 60, 65, 70, 75, 80, 85, 90, 95, 100, 200, 400, 1000, 10000, or greater. In another embodiment, the kd value of the antibody at pH7.4 can be 10⁻² l/s, 10⁻³ l/s, 10⁻⁴ l/s, 10⁻⁵ l/s, 10⁻⁶ l/s, or less. In another embodiment, the kd value of the antibody at pH5.8 can be 10⁻³ l/s, 10⁻² l/s, 10⁻¹ l/s, or greater.

[0172] As used herein, the expression “acidic pH” means a pH of 4.0 to 6.5. The expression “acidic pH” includes pH values of any one of 4.0, 4.1, 4.2, 4.3, 4.4, 4.5, 4.6, 4.7, 4.8, 4.9, 5.0, 5.1, 5.2, 5.3, 5.4, 5.5, 5.6, 5.7, 5.8, 5.9, 6.0, 6.1, 6.2, 6.3, 6.4, and 6.5. In particular aspects, the “acidic pH” is 5.8.

[0173] As used herein, the expression “neutral pH” means a pH of 6.7 to about 10.0. The expression “neutral pH” includes pH values of any one of 6.7, 6.8, 6.9, 7.0, 7.1, 7.2, 7.3, 7.4, 7.5, 7.6, 7.7, 7.8, 7.9, 8.0, 8.1, 8.2, 8.3, 8.4, 8.5, 8.6, 8.7, 8.8, 8.9, 9.0, 9.1, 9.2, 9.3, 9.4, 9.5, 9.6, 9.7, 9.8, 9.9, and 10.0. In particular aspects, the “neutral pH” is 7.4.

[0174] KD values, and kd values, as expressed herein, may be determined using a surface plasmon resonance-based biosensor to characterize antibody-antigen interactions. (See, e.g., Example 7, herein.) KD values, and kd values can be determined at 25° C. or 37° C.

[0175] In certain embodiments, an anti-myostatin antibody of the present invention binds to myostatin from more than one species. In further embodiments, the anti-myostatin antibody binds to myostatin from a human and non-human animal. In further embodiments, the anti-myostatin antibody binds to myostatin from human, mouse, and monkey (e.g., cynomolgus, rhesus macaque, marmoset, chimpanzee, or baboon).

[0176] In certain embodiments, an anti-myostatin antibody of the present invention binds to latent myostatin from more than one species. In further embodiments, the anti-myostatin antibody binds to latent myostatin from a human and non-human animal. In further embodiments, the anti-myostatin antibody binds to latent myostatin from human, mouse, and monkey.

[0177] In certain embodiments, an anti-myostatin antibody of the present invention binds to propeptide myostatin from more than one species. In further embodiments, the anti-myostatin antibody binds to propeptide myostatin from a human and non-human animal. In further embodiments, the anti-myostatin antibody binds to propeptide myostatin from human, mouse, and monkey.

[0178] In a further aspect, the invention provides an anti-myostatin antibody that forms an immune complex (i.e. antigen-antibody complex) with myostatin. In certain embodiments, two or more anti-myostatin antibodies bind to two or more myostatin molecules to form an immune complex. This is possible because myostatin exists as a homodimer containing two myostatin molecules while an antibody has two antigen-binding sites. The anti-myostatin antibody may bind to the same epitope on a myostatin molecule or may bind to different epitopes on a myostatin molecule, much like a bispecific antibody. Generally speaking, when two or more antibodies form an immune complex with two or more antigens, the resulting immune complex can strongly bind to Fc receptors existing on cell surfaces due to avidity effects through the Fc regions of the antibodies in the complex and can then be taken up into the cell with high efficiency. Thus, the above-mentioned anti-myostatin antibody capable of forming an immune complex containing two or more anti-myostatin antibodies and two or more myostatin molecules can lead to a rapid clearance of myostatin from plasma in a living body, via the strong binding to Fc receptors due to avidity effects.

[0179] Furthermore, an antibody with pH-dependent binding characteristics is thought to have superior properties in terms of antigen neutralization and clearance relative to its counterpart that binds in a pH-independent manner (Igawa et al., Nature Biotech. 28(11):1203-1207 (2010); Devanaboyina et al. mAbs 5(6):851-859 (2013); WO 2009/125825). Therefore, an antibody having both properties above, that is, an antibody which has pH-dependent binding characteristics and which forms an immune complex containing two or more antibodies with two or more antigens, is expected to have even more superior properties for highly accelerated elimination of antigens from plasma (WO 2013/081143).

[0180] In another aspect, the invention provides an anti-myostatin antibody comprising at least one, two, three, four, five, or six HVRs selected from (a) a HVR-H1 comprising the amino acid sequence of SEQ ID NO: 55-57, 114-115, or 126; (b) a HVR-H2 comprising the amino acid sequence of SEQ ID NO: 58-60, 116-120, or 127; (c) a HVR-H3 comprising the amino acid sequence of SEQ ID NO: 61-64, 121, or 128; (d) a HVR-L1 comprising the amino acid sequence of SEQ ID NO: 65-69, 122-124, or 129; (e) a HVR-L2 comprising the amino acid sequence of SEQ ID NO: 70-72, 125, or 130; and (f) a HVR-L3 comprising the amino acid sequence of SEQ ID NO: 73, 74, or 131.

[0181] In another aspect, the invention provides an anti-myostatin antibody comprising at least one, two, three, four, five, or six HVRs selected from (a) a HVR-H1 comprising the amino acid sequence of SEQ ID NO:55, 56, or 57; (b) a HVR-H2 comprising the amino acid sequence of SEQ ID NO:58, 59, or 60; (c) a HVR-H3 comprising the amino acid sequence of SEQ ID NO: 61, 62, 63, or 64; (d) a HVR-L1 comprising the amino acid sequence of SEQ ID NO: 65, 66, 67, 68, or 69; (e) a HVR-L2 comprising the amino acid sequence of SEQ ID NO: 70, 71, or 72; and (f) a HVR-L3 comprising the amino acid sequence of SEQ ID NO: 73 or 74.

[0182] In one aspect, the invention provides an anti-myostatin antibody comprising at least one, two, three, four, five, or six hypervariable regions (HVRs) selected from (a) a HVR-H1 comprising the amino acid sequence of SEQ ID NO: 114 or 115; (b) a HVR-H2 comprising the amino acid sequence of SEQ ID NO: 116-119, or 120; (c) a HVR-H3 comprising the amino acid sequence of SEQ ID NO: 121; (d) a HVR-L1 comprising the amino acid sequence of SEQ ID NO: 122, 123, or 124; (e) a HVR-L2 comprising the amino acid sequence of SEQ ID NO: 125; and (f) a HVR-L3 comprising the amino acid sequence of SEQ ID NO: 73 or 74.

[0183] In another aspect, the invention provides an anti-myostatin antibody comprising at least one, two, three, four, five, or six HVRs selected from (a) a HVR-H1 comprising the amino acid sequence of SEQ ID NO: 114; (b) a HVR-H2 comprising the amino acid sequence of SEQ ID NO: 58; (c) a HVR-H3 comprising the amino acid sequence of SEQ ID NO: 63; (d) a HVR-L1 comprising the amino acid sequence of SEQ ID NO: 122; (e) a HVR-L2 comprising the amino acid sequence of SEQ ID NO: 71; and (f) a HVR-L3 comprising the amino acid sequence of SEQ ID NO: 74.

[0184] In another aspect, the invention provides an anti-myostatin antibody comprising at least one, two, three, four, five, or six HVRs selected from (a) a HVR-H1 comprising the amino acid sequence of SEQ ID NO: 114; (b) a HVR-H2 comprising the amino acid sequence of SEQ ID NO: 58; (c) a HVR-H3 comprising the amino acid sequence of SEQ ID NO: 63; (d) a HVR-L1 comprising the amino acid sequence of SEQ ID NO: 123; (e) a HVR-L2 comprising the amino acid sequence of SEQ ID NO: 71; and (f) a HVR-L3 comprising the amino acid sequence of SEQ ID NO: 74.

[0185] In another aspect, the invention provides an anti-myostatin antibody comprising at least one, two, three, four, five, or six HVRs selected from (a) a HVR-H1 comprising the amino acid sequence of SEQ ID NO: 126; (b) a HVR-H2 comprising the amino acid sequence of SEQ ID NO: 127; (c) a HVR-H3 comprising the amino acid sequence of SEQ ID NO: 128; (d) a HVR-L1 comprising the amino acid sequence of SEQ ID NO: 129; (e) a HVR-L2 comprising the amino acid sequence of SEQ ID NO: 130; and (f) a HVR-L3 comprising the amino acid sequence of SEQ ID NO: 131.

[0186] In one aspect, the invention provides an antibody comprising at least one, at least two, or all three VH HVR sequences selected from (a) a HVR-H1 comprising the amino acid sequence of SEQ ID NO: 55-57, 114-115, or 126; (b) a HVR-H2 comprising the amino acid sequence of SEQ ID NO; 58-60, 116-120, or 127; (c) a HVR-H3 comprising the amino acid sequence of SEQ ID NO: 61-64, 121, or 128. In one embodiment, the antibody comprises a HVR-H3 comprising the amino acid sequence of SEQ ID NO: 61-64, 121, or 128. In another embodiment, the antibody comprises a HVR-H3 comprising the amino acid sequence of SEQ ID NO: 61-64, 121, or 128 and HVR-L3 comprising the amino acid sequence of SEQ ID NO: 73, 74, or 131. In a further embodiment, the antibody comprises a HVR-H3 comprising the amino acid sequence of SEQ ID NO: 61-64, 121, or 128, HVR-L3 comprising the amino acid sequence of SEQ ID NO: 73, 74, or 131, and HVR-H2 comprising the amino acid sequence of SEQ ID NO: 58-60, 116-120, or 127. In a further embodiment, the antibody comprises (a) a HVR-H1 comprising the amino acid sequence of SEQ ID NO: 55-57, 114-115, or 126; (b) a HVR-H2 comprising the amino acid sequence of SEQ ID NO: 58-60, 116-120, or 127; and (c) a HVR-H3 comprising the amino acid sequence of SEQ ID NO: 61-64, 121, or 128.

[0187] In one aspect, the invention provides an antibody comprising at least one, at least two, or all three VH HVR sequences selected from (a) a HVR-H1 comprising the amino acid sequence of SEQ ID NO:55, 56, or 57; (b) a HVR-H2 comprising the amino acid sequence of SEQ ID NO:58, 59, or 60; and (c) a HVR-H3 comprising the amino acid sequence of SEQ ID NO: 61, 62, 63, or 64. In one embodiment, the antibody comprises a HVR-H3 comprising the amino acid sequence of SEQ ID NO: 61, 62, 63, or 64. In another embodiment, the antibody comprises a HVR-H3 comprising the amino acid sequence of SEQ ID NO: 61, 62, 63, or 64 and HVR-L3 comprising the amino acid sequence of SEQ ID NO: 73 or 74. In a further embodiment, the antibody comprises a HVR-H3 comprising the amino acid sequence of SEQ ID NO: 61, 62, 63, or 64, HVR-L3 comprising the amino acid sequence of SEQ ID NO: 73 or 74, and HVR-H2 comprising the amino acid sequence of SEQ ID NO:58, 59, or 60. In a further embodiment, the antibody comprises (a) a HVR-H1 comprising the amino acid sequence of SEQ ID NO:55, 56, or 57; (b) a HVR-H2 comprising the amino acid sequence of SEQ ID NO:58, 59, or 60; and (c) a HVR-H3 comprising the amino acid sequence of SEQ ID NO: 61, 62, 63, or 64.

[0188] In another aspect, the invention provides an antibody comprising at least one, at least two, or all three VH HVR sequences selected from (a) a HVR-H1 comprising the amino acid sequence of SEQ ID NO: 114 or 115; (b) a HVR-H2 comprising the amino acid sequence of SEQ ID NO: 116-119, or 120; and (c) a HVR-H3 comprising the amino acid sequence of SEQ ID NO: 121. In one embodiment, the antibody comprises a HVR-H3 comprising the amino acid sequence of SEQ ID NO: 121. In another embodiment, the antibody comprises a HVR-H3 comprising the amino acid sequence of SEQ ID NO: 121 and HVR-L3 comprising the amino acid sequence of SEQ ID NO: 73 or 74. In a further embodiment, the antibody comprises a HVR-H3 comprising the amino acid sequence of SEQ ID NO: 121, HVR-L3 comprising the amino acid sequence of SEQ ID NO: 73 or 74, and HVR-H2 comprising the amino acid sequence of SEQ ID NO: 116-119, or 120. In a further embodiment, the antibody comprises (a) a HVR-H1 comprising the amino acid sequence of SEQ ID NO: 114 or 15; (b) a HVR-H2 comprising the amino acid sequence of SEQ ID NO: 116-119, or 120; and (c) a HVR-H3 comprising the amino acid sequence of SEQ ID NO: 121.

[0189] In another aspect, the invention provides an antibody comprising at least one, at least two, or all three VH HVR sequences selected from (a) a HVR-H1 comprising the amino acid sequence of SEQ ID NO: 114; (b) a HVR-H2 comprising the amino acid sequence of SEQ ID NO: 58; and (c) a HVR-H3 comprising the amino acid sequence of SEQ ID NO: 63. In one embodiment, the antibody comprises a HVR-H3 comprising the amino acid sequence of SEQ ID NO: 63. In another embodiment, the antibody comprises a HVR-H3 comprising the amino acid sequence of SEQ ID NO: 63 and HVR-L3 comprising the amino acid sequence of SEQ ID NO: 74. In a further embodiment, the antibody comprises a HVR-H3 comprising the amino acid sequence of SEQ ID NO: 63, HVR-L3 comprising the amino acid sequence of SEQ ID NO: 74, and HVR-H2 comprising the amino acid sequence of SEQ ID NO: 58. In a further embodiment, the antibody comprises (a) a HVR-H1 comprising the amino acid sequence of SEQ ID NO: 114; (b) a HVR-H2 comprising the amino acid sequence of SEQ ID NO: 58; and (c) a HVR-H3 comprising the amino acid sequence of SEQ ID NO: 63.

[0190] In another aspect, the invention provides an antibody comprising at least one, at least two, or all three VH HVR sequences selected from (a) a HVR-H1 comprising the amino acid sequence of SEQ ID NO: 126; (b) a HVR-H2 comprising the amino acid sequence of SEQ ID NO: 127; and (c) a HVR-H3 comprising the amino acid sequence of SEQ ID NO: 128. In one embodiment, the antibody comprises a HVR-H3 comprising the amino acid sequence of SEQ ID NO: 128. In another embodiment, the antibody comprises a HVR-H3 comprising the amino acid sequence of SEQ ID NO: 128 and HVR-L3 comprising the amino acid sequence of SEQ ID NO: 131. In a further embodiment, the antibody comprises a HVR-H3 comprising the amino acid sequence of SEQ ID NO: 128, HVR-L3 comprising the amino acid sequence of SEQ ID NO: 131, and HVR-H2 comprising the amino acid sequence of SEQ ID NO: 127. In a further embodiment, the antibody comprises (a) a HVR-H1 comprising the amino acid sequence of SEQ ID NO: 126; (b) a HVR-H2 comprising the amino acid sequence of SEQ ID NO: 127; and (c) a HVR-H3 comprising the amino acid sequence of SEQ ID NO: 128.

[0191] In another aspect, the invention provides an antibody comprising at least one, at least two, or all three VL HVR sequences selected from (a) a HVR-L1 comprising the amino acid sequence of SEQ ID NO: 65, 66, 67, 68, or 69, 122-124, 129; (b) a HVR-L2 comprising the amino acid sequence of SEQ ID NO: 70-72, 125, or 130; and (c) a HVR-L3 comprising the amino acid sequence of SEQ ID NO: 73, 74, or 131. In one embodiment, the antibody comprises (a) a HVR-L1 comprising the amino acid sequence of SEQ ID NO: 65, 66, 67, 68, or 69, 122-124, 129; (b) a HVR-L2 comprising the amino acid sequence of SEQ ID NO: 70-72, 125, or 130; and (c) a HVR-L3 comprising the amino acid sequence of SEQ ID NO: 73, 74, or 131.

[0192] In another aspect, the invention provides an antibody comprising at least one, at least two, or all three VL HVR sequences selected from (a) a HVR-L1 comprising the amino acid sequence of SEQ ID NO: 65, 66, 67, 68, or 69; (b) a HVR-L2 comprising the amino acid sequence of SEQ ID NO: 70, 71, or 72; and (c) a HVR-L3 comprising the amino acid sequence of SEQ ID NO: 73 or 74. In one embodiment, the antibody comprises (a) a HVR-L1 comprising the amino acid sequence of SEQ ID NO: 65, 66, 67, 68, or 69; (b) a HVR-L2 comprising the amino acid sequence of SEQ ID NO: 70, 71, or 72; and (c) a HVR-L3 comprising the amino acid sequence of SEQ ID NO: 73 or 74. In another aspect, the invention provides an antibody comprising at least one, at least two, or all three VL HVR sequences selected from (a) a HVR-L1 comprising the amino acid sequence of SEQ ID NO: 122, 123, or 124; (b) a HVR-L2 comprising the amino acid sequence of SEQ ID NO: 125; and (c) a HVR-L3 comprising the amino acid sequence of SEQ ID NO: 73 or 74. In one embodiment, the antibody comprises (a) a HVR-L1 comprising the amino acid sequence of SEQ ID NO: 122, 123, or 124; (b) a HVR-L2 comprising the amino acid sequence of SEQ ID NO: 125; and (c) a HVR-L3 comprising the amino acid sequence of SEQ ID NO: 73 or 74.

[0193] In another aspect, the invention provides an antibody comprising at least one, at least two, or all three VL HVR sequences selected from (a) a HVR-L comprising the amino acid sequence of SEQ ID NO: 122; (b) a HVR-L2 comprising the amino acid sequence of SEQ ID NO: 71; and (c) a HVR-L3 comprising the amino acid sequence of SEQ ID NO: 74. In one embodiment, the antibody comprises (a) a HVR-L1 comprising the amino acid sequence of SEQ ID NO: 122; (b) a HVR-L2 comprising the amino acid sequence of SEQ ID NO: 71; and (c) a HVR-L3 comprising the amino acid sequence of SEQ ID NO: 74. In another aspect, the invention provides an antibody comprising at least one, at least two, or all three VL HVR sequences selected from (a) a HVR-L1 comprising the amino acid sequence of SEQ ID NO: 123; (b) a HVR-L2 comprising the amino acid sequence of SEQ ID NO: 71; and (c) a HVR-L3 comprising the amino acid sequence of SEQ ID NO: 74. In one embodiment, the antibody comprises (a) a HVR-L1 comprising the amino acid sequence of SEQ ID NO: 123; (b) a HVR-L2 comprising the amino acid sequence of SEQ ID NO: 71; and (c) a HVR-L3 comprising the amino acid sequence of SEQ ID NO: 74

[0194] In another aspect, the invention provides an antibody comprising at least one, at least two, or all three VL HVR sequences selected from (a) a HVR-L1 comprising the amino acid sequence of SEQ ID NO: 129; (b) a HVR-L2 comprising the amino acid sequence of SEQ ID NO: 130; and (c) a HVR-L3 comprising the amino acid sequence of SEQ ID NO: 131. In one embodiment, the antibody comprises (a) a HVR-L1 comprising the amino acid sequence of SEQ ID NO: 129; (b) a HVR-L2 comprising the amino acid sequence of SEQ ID NO: 130; and (c) a HVR-L3 comprising the amino acid sequence of SEQ ID NO 131.

[0195] In another aspect, an antibody of the invention comprises (a) a VH domain comprising at least one, at least two, or all three VH HVR sequences selected from (i) a HVR-H1 comprising the amino acid sequence of SEQ ID NO:55, 56, or 57, 114, 115, 126 (ii) a HVR-H2 comprising the amino acid sequence of SEQ ID NO: 58-60, 116-120, or 127, and (iii) a HVR-H3 comprising the amino acid sequence of SEQ ID NO: 61-64, 121, or 128; and (b) a VL domain comprising at least one, at least two, or all three VL HVR sequences selected from (i) a HVR-L1 comprising the amino acid sequence of SEQ ID NO: 65-69, 122-124, or 129, (ii) a HVR-L2 comprising the amino acid sequence of SEQ ID NO: 70-72, 125, or 130 and (c) a HVR-L3 comprising the amino acid sequence of SEQ ID NO: 73, 74, or 131.

[0196] In another aspect, an antibody of the invention comprises (a) a VH domain comprising at least one, at least two, or all three VH HVR sequences selected from (i) a HVR-H1 comprising the amino acid sequence of SEQ ID NO:55, 56, or 57, (ii) a HVR-H2 comprising the amino acid sequence of SEQ ID NO:58, 59, or 60, and (iii) a HVR-H3 comprising the amino acid sequence of SEQ ID NO: 61, 62, 63, or 64; and (b) a VL domain comprising at least one, at least two, or all three VL HVR sequences selected from (i) a HVR-L comprising the amino acid sequence of SEQ ID NO: 65, 66, 67, 68, or 69, (ii) a HVR-L2 comprising the amino acid sequence of SEQ ID NO: 70, 71, or 72, and (c) a HVR-L3 comprising the amino acid sequence of SEQ ID NO: 73 or 74.

[0197] In another aspect, an antibody of the invention comprises (a) a VH domain comprising at least one, at least two, or all three VH HVR sequences selected from (i) a HVR-H1 comprising the amino acid sequence of SEQ ID NO: 114 or 115, (ii) a HVR-H2 comprising the amino acid sequence of SEQ ID NO: 116-119, or 120, and (iii) a HVR-H3 comprising the amino acid sequence of SEQ ID NO: 121; and (b) a VL domain comprising at least one, at least two, or all three VL HVR sequences selected from (i) a HVR-L1 comprising the amino acid sequence of SEQ ID NO: 122, 123, or 124, (ii) a HVR-L2 comprising the amino acid sequence of SEQ ID NO: 125, and (c) a HVR-L3 comprising the amino acid sequence of SEQ ID NO: 73 or 74.

[0198] In another aspect, an antibody of the invention comprises (a) a VH domain comprising at least one, at least two, or all three VH HVR sequences selected from (i) a HVR-H1 comprising the amino acid sequence of SEQ ID NO: 114, (ii) a HVR-H2 comprising the amino acid sequence of SEQ ID NO: 58, and (iii) a HVR-H3 comprising the amino acid sequence of SEQ ID NO: 63; and (b) a VL domain comprising at least one, at least two, or all three VL HVR sequences selected from (i) a HVR-L1 comprising the amino acid sequence of SEQ ID NO: 122, (ii) a HVR-L2 comprising the amino acid sequence of SEQ ID NO: 71, and (c) a HVR-L3 comprising the amino acid sequence of SEQ ID NO: 74.

[0199] In another aspect, an antibody of the invention comprises (a) a VH domain comprising at least one, at least two, or all three VH HVR sequences selected from (i) a HVR-H1 comprising the amino acid sequence of SEQ ID NO: 114, (ii) a HVR-H2 comprising the amino acid sequence of SEQ ID NO: 58, and (iii) a HVR-H3 comprising the amino acid sequence of SEQ ID NO: 63; and (b) a VL domain comprising at least one, at least two, or all three VL HVR sequences selected from (i) a HVR-L1 comprising the amino acid sequence of SEQ ID NO: 123, (ii) a HVR-L2 comprising the amino acid sequence of SEQ ID NO: 71, and (c) a HVR-L3 comprising the amino acid sequence of SEQ ID NO: 74.

[0200] In another aspect, an antibody of the invention comprises (a) a VH domain comprising at least one, at least two, or all three VH HVR sequences selected from (i) a HVR-H1 comprising the amino acid sequence of SEQ ID NO: 126, (ii) a HVR-H2 comprising the amino acid sequence of SEQ ID NO: 127, and (iii) a HVR-H3 comprising the amino acid sequence of SEQ ID NO: 128; and (b) a VL domain comprising at least one, at least two, or all three VL HVR sequences selected from (i) a HVR-L1 comprising the amino acid sequence of SEQ ID NO: 129, (ii) a HVR-L2 comprising the amino acid sequence of SEQ ID NO: 130, and (c) a HVR-L3 comprising the amino acid sequence of SEQ ID NO: 131.

[0201] In another aspect, the invention provides an antibody comprising (a) a HVR-H1 comprising the amino acid sequence of SEQ ID NO: 55-57, 114-115, or 126; (b) a HVR-H2 comprising the amino acid sequence of SEQ ID NO: 58-60, 116-120, or 127; (c) a HVR-H3 comprising the amino acid sequence of SEQ ID NO: 61-64, 121, or 128; (d) a HVR-L1 comprising the amino acid sequence of SEQ ID NO: 65-69, 122-124, or 129; (e) a HVR-L2 comprising the amino acid sequence of SEQ ID NO: 70-72, 125, or 130; and (f) a HVR-L3 comprising the amino acid sequence of SEQ ID NO: 73, 74, or 131.

[0202] In another aspect, the invention provides an antibody comprising (a) a HVR-H1 comprising the amino acid sequence of SEQ ID NO:55, 56, or 57, 114-115; (b) a HVR-H2 comprising the amino acid sequence of SEQ ID NO:58, 59, or 60, 116-120; (c) a HVR-H3 comprising the amino acid sequence of SEQ ID NO: 61, 62, 63, or 64, 121; (d) a HVR-L1 comprising the amino acid sequence of SEQ ID NO: 65, 66, 67, 68, or 69, 122-124; (e) a HVR-L2 comprising the amino acid sequence of SEQ ID NO: 70, 71, or 72, 125; and (f) a HVR-L3 comprising the amino acid sequence of SEQ ID NO: 73 or 74.

[0203] In another aspect, the invention provides an antibody comprising (a) a HVR-H1 comprising the amino acid sequence of SEQ ID NO: 114 or 115; (b) a HVR-H2 comprising the amino acid sequence of SEQ ID NO: 116-119, or 120; (c) a HVR-H3 comprising the amino acid sequence of SEQ ID NO: 121; (d) a HVR-L1 comprising the amino acid sequence of SEQ ID NO: 122, 123, or 124; (e) a HVR-L2 comprising the amino acid sequence of SEQ ID NO: 125; and (f) a HVR-L3 comprising the amino acid sequence of SEQ ID NO: 73 or 74.

[0204] In another aspect, the invention provides an antibody comprising (a) a HVR-H1 comprising the amino acid sequence of SEQ ID NO: 114; (b) a HVR-H2 comprising the amino acid sequence of SEQ ID NO: 58; (c) a HVR-H3 comprising the amino acid sequence of SEQ ID NO: 63; (d) a HVR-L1 comprising the amino acid sequence of SEQ ID NO: 122; (e) a HVR-L2 comprising the amino acid sequence of SEQ ID NO: 71; and (f) a HVR-L3 comprising the amino acid sequence of SEQ ID NO: 74.

[0205] In another aspect, the invention provides an antibody comprising (a) a HVR-H1 comprising the amino acid sequence of SEQ ID NO: 114; (b) a HVR-H2 comprising the amino acid sequence of SEQ ID NO: 58; (c) a HVR-H3 comprising the amino acid sequence of SEQ ID NO: 63; (d) a HVR-L1 comprising the amino acid sequence of SEQ ID NO: 123; (e) a HVR-L2 comprising the amino acid sequence of SEQ ID NO: 71; and (f) a HVR-L3 comprising the amino acid sequence of SEQ ID NO: 74.

[0206] In another aspect, the invention provides an antibody comprising (a) a HVR-H1 comprising the amino acid sequence of SEQ ID NO: 126; (b) a HVR-H2 comprising the amino acid sequence of SEQ ID NO: 127; (c) a HVR-H3 comprising the amino acid sequence of SEQ ID NO: 128; (d) a HVR-L1 comprising the amino acid sequence of SEQ ID NO: 129; (e) a HVR-L2 comprising the amino acid sequence of SEQ ID NO: 130; and (f) a HVR-L3 comprising the amino acid sequence of SEQ ID NO: 131.

[0207] In certain embodiments, any one or more amino acids of an anti-myostatin antibody as provided above are substituted at the following HVR positions: (a) in HVR-H1 (SEQ ID NO: 55), at positions 1, and 2; (b) in HVR-H2 (SEQ ID NO: 58), at positions 4, 7, 8, 10, 11, 12, and 16; (c) in HVR-H3 (SEQ ID NO: 61), at positions 5, 7, and 11; (d) in HVR-L1 (SEQ ID NO: 65), at positions 1, 2, 5, 7, 8, and 9; (e) in HVR-L2 (SEQ ID NO:70), at positions 3, and 7; and (f) in HVR-L3 (SEQ ID NO:73), at position 8.

[0208] In certain embodiments, the one or more amino acid substitutions of an anti-myostatin antibody are conservative substitutions, as provided herein. In certain embodiments, any one or more of the following substitutions may be made in any combination: (a) in HVR-H1 (SEQ ID NO: 55), S1H; Y2T, D, or E; (b) in HVR-H2 (SEQ ID NO: 58), Y4H; S7K; T8M or K; Y10K; A11M or E; S12E; G16K; (c) in HVR-H3 (SEQ ID NO: 61), Y5H; T7H; L11K; (d) in HVR-L1 (SEQ ID NO: 65), Q1T; S2T; S5E; Y7F; D8H; N9D or A or E; (e) in HVR-L2 (SEQ ID NO: 70), S3E; S7Y, F or W; and (f) in HVR-L3 (SEQ ID NO: 73), L8R.

[0209] All possible combinations of the above substitutions are encompassed by the consensus sequences of SEQ ID NOs: 126, 127, 128, 129, 130, and 131, for HVR-H1, HVR-H2, HVR-H3, HVR-L1, HVR-L2, and HVR-L3, respectively.

[0210] In any of the above embodiments, an anti-myostatin antibody can be humanized. In one embodiment, an anti-myostatin antibody comprises HVRs as in any of the above embodiments, and further comprises an acceptor human framework, e.g., a human immunoglobulin framework or a human consensus framework. In another embodiment, an anti-myostatin antibody comprises HVRs as in any of the above embodiments, and further comprises a VH or VL comprising an FR sequence. In a further embodiment, the anti-myostatin antibody comprises the following heavy chain and/or light chain variable domain FR sequences: For the heavy chain variable domain, the FR1 comprises the amino acid sequence of SEQ ID NO: 132, 133, or 134, FR2 comprises the amino acid sequence of SEQ ID NO: 135 or 136, FR3 comprises the amino acid sequence of SEQ ID NO: 137, FR4 comprises the amino acid sequence of SEQ ID NO: 138. For the light chain variable domain, FR1 comprises the amino acid sequence of SEQ ID NO: 139, FR2 comprises the amino acid sequence of SEQ ID NO: 140 or 141, FR3 comprises the amino acid sequence of SEQ ID NO: 142 or 143, FR4 comprises the amino acid sequence of SEQ ID NO: 144.

[0211] In one aspect, the invention provides an anti-myostatin antibody comprising at least one, two, three, four, five, or six HVRs selected from (a) a HVR-H1 comprising the amino acid sequence of SEQ ID NO: 157-161, or 162; (b) a HVR-H2 comprising the amino acid sequence of SEQ ID NO: 163-167, or 168; (c) a HVR-H3 comprising the amino acid sequence of SEQ ID NO: 169-173, or 174; (d) a HVR-L1 comprising the amino acid sequence of SEQ ID NO: 175-179, or 180; (e) a HVR-L2 comprising the amino acid sequence of SEQ ID NO: 181-185, or 186; and (f) a HVR-L3 comprising the amino acid sequence of SEQ ID NO: 187-191, or 192.

[0212] In one aspect, the invention provides an antibody comprising at least one, at least two, or all three VH HVR sequences selected from (a) a HVR-H1 comprising the amino acid sequence of SEQ ID NO: 157-161, or 162; (b) a HVR-H2 comprising the amino acid sequence of SEQ ID NO: 163-167, or 168; and (c) a HVR-H3 comprising the amino acid sequence of SEQ ID NO: 169-173, or 174. In one embodiment, the antibody comprises a HVR-H3 comprising the amino acid sequence of SEQ ID NO: 169-173, or 174. In another embodiment, the antibody comprises a HVR-H3 comprising the amino acid sequence of SEQ ID NO: 169-173, or 174 and HVR-L3 comprising the amino acid sequence of SEQ ID NO: 187-191, or 192. In a further embodiment, the antibody comprises a HVR-H3 comprising the amino acid sequence of SEQ ID NO: 169-173, or 174, HVR-L3 comprising the amino acid sequence of SEQ ID NO: 187-191, or 192, and a HVR-H2 comprising the amino acid sequence of SEQ ID NO: 163-167, or 168. In a further embodiment, the antibody comprises (a) a HVR-H1 comprising the amino acid sequence of SEQ ID NO: 157-161, or 162; (b) a HVR-H2 comprising the amino acid sequence of SEQ ID NO: 163-167, or 168; and (c) a HVR-H3 comprising the amino acid sequence of SEQ ID NO: 169-173, or 174.

[0213] In another aspect, the invention provides an antibody comprising at least one, at least two, or all three VL HVR sequences selected from (a) a HVR-L1 comprising the amino acid sequence of SEQ ID NO: 175-179, or 180; (b) a HVR-L2 comprising the amino acid sequence of SEQ ID NO: 181-185, or 186; and (c) a HVR-L3 comprising the amino acid sequence of SEQ ID NO: 187-191, or 192. In one embodiment, the antibody comprises (a) a HVR-L1 comprising the amino acid sequence of SEQ ID NO: 175-179, or 180; (b) a HVR-L2 comprising the amino acid sequence of SEQ ID NO: 181-185, or 186; and (c) a HVR-L3 comprising the amino acid sequence of SEQ ID NO: 187-191, or 192.

[0214] In another aspect, an antibody of the invention comprises (a) a VH domain comprising at least one, at least two, or all three VH HVR sequences selected from (i) a HVR-H1 comprising the amino acid sequence of SEQ ID NO: 157-161, or 162, (ii) a HVR-H2 comprising the amino acid sequence of SEQ ID NO: 163-167, or 168, and (iii) a HVR-H3 comprising the amino acid sequence of SEQ ID NO: 169-173, or 174; and (b) a VL domain comprising at least one, at least two, or all three VL HVR sequences selected from (i) a HVR-L1 comprising the amino acid sequence of SEQ ID NO: 175-179, or 180, (ii) a HVR-L2 comprising the amino acid sequence of SEQ ID NO: 181-185, or 186, and (c) a HVR-L3 comprising the amino acid sequence of SEQ ID NO: 187-191, or 192.

[0215] In another aspect, the invention provides an antibody comprising (a) a HVR-H1 comprising the amino acid sequence of SEQ ID NO: 157-161, or 162; (b) a HVR-H2 comprising the amino acid sequence of SEQ ID NO: 163-167, or 168; (c) a HVR-H3 comprising the amino acid sequence of SEQ ID NO: 169-173, or 174; (d) a HVR-L1 comprising the amino acid sequence of SEQ ID NO: 175-179, or 180; (e) a HVR-L2 comprising the amino acid sequence of SEQ ID NO: 181-185, or 186; and (f) a HVR-L3 comprising the amino acid sequence of SEQ ID NO: 187-191, or 192.

[0216] In another aspect, an anti-myostatin antibody comprises a heavy chain variable domain (VH) sequence having at least 90%, 91%, 92%, 93%, 94%, 95%, 96%, 97%, 98%, 99%, or 100% sequence identity to the amino acid sequence of SEQ ID NO: 13, 16-30, 32-34, 86-94, or 95. In certain embodiments, a VH sequence having at least 90%, 91%, 92%, 93%, 94%, 95%, 96%, 97%, 98%, or 99% identity contains substitutions (e.g., conservative substitutions), insertions, or deletions relative to the reference sequence, but an anti-myostatin antibody comprising that sequence retains the ability to bind to myostatin. In certain embodiments, a total of 1 to 10 amino acids have been substituted, inserted and/or deleted in SEQ ID NO: 13, 16-30, 32, 33, or 34. In certain embodiments, substitutions, insertions, or deletions occur in regions outside the HVRs (i.e., in the FRs). Optionally, the anti-myostatin antibody comprises the VH sequence in SEQ ID NO: 13, 16-30, 32, 33, or 34, including post-translational modifications of that sequence. In a particular embodiment, the VH comprises one, two or three HVRs selected from: (a) a HVR-H1 comprising the amino acid sequence of SEQ ID NO:55, 56, or 57, (b) a HVR-H2 comprising the amino acid sequence of SEQ ID NO:58, 59, or 60, and (c) a HVR-H3 comprising the amino acid sequence of SEQ ID NO: 61, 62, 63, or 64.

[0217] In another aspect, an anti-myostatin antibody comprises a heavy chain variable domain (VH) sequence having at least 90%, 91%, 92%, 93%, 94%, 95%, 96%, 97%, 98%, 99%, or 100% sequence identity to the amino acid sequence of SEQ ID NO: 13, 16-30, 32-34, 86-94, or 95. In certain embodiments, a VH sequence having at least 90%, 91%, 92%, 93%, 94%, 95%, 96%, 97%, 98%, or 99% identity contains substitutions (e.g., conservative substitutions), insertions, or deletions relative to the reference sequence, but an anti-myostatin antibody comprising that sequence retains the ability to bind to myostatin. In certain embodiments, a total of 1 to 10 amino acids have been substituted, inserted and/or deleted in SEQ ID NO: 13, 16-30, 32-34, 86-94, or 95. In certain embodiments, substitutions, insertions, or deletions occur in regions outside the HVRs (i.e., in the FRs). Optionally, the anti-myostatin antibody comprises the VH sequence in SEQ ID NO: 13, 16-30, 32-34, 86-94, or 95, including post-translational modifications of that sequence. In a particular embodiment, the VH comprises one, two or three HVRs selected from: (a) a HVR-H1 comprising the amino acid sequence of SEQ ID NO: 55-57, 114-115, or 126, (b) a HVR-H2 comprising the amino acid sequence of SEQ ID NO: 58-60, 116-120, or 127, and (c) a HVR-H3 comprising the amino acid sequence of SEQ ID NO: 61-64, 121, or 128.

[0218] In another aspect, an anti-myostatin antibody comprises a VH sequence having at least 90%, 91%, 92%, 93%, 94%, 95%, 96%, 97%, 98%, 99%, or 100% sequence identity to the amino acid sequence of SEQ ID NO: 13, 16-30, 32, 33, or 34. In certain embodiments, a VH sequence having at least 90%, 91%, 92%, 93%, 94%, 95%, 96%, 97%, 98%, or 99% identity contains substitutions (e.g., conservative substitutions), insertions, or deletions relative to the reference sequence, but an anti-myostatin antibody comprising that sequence retains the ability to bind to myostatin. In certain embodiments, a total of 1 to 10 amino acids have been substituted, inserted and/or deleted in SEQ ID NO: 13, 16-30, 32, 33 or 34. In certain embodiments, substitutions, insertions, or deletions occur in regions outside the HVRs (i.e., in the FRs). Optionally, the anti-myostatin antibody comprises the VH sequence in SEQ ID NO: 13, 16-30, 32, 33, or 34, including post-translational modifications of that sequence. In a particular embodiment, the VH comprises one, two or three HVRs selected from: (a) a HVR-H1 comprising the amino acid sequence of SEQ ID NO:55, 56, or 57, (b) a HVR-H2 comprising the amino acid sequence of SEQ ID NO:58, 59, or 60, and (c) a HVR-H3 comprising the amino acid sequence of SEQ ID NO: 61, 62, 63, or 64.

[0219] In another aspect, an anti-myostatin antibody comprises a VH sequence having at least 90%, 91%, 92%, 93%, 94%, 95%, 96%, 97%, 98%, 99%, or 100% sequence identity to the amino acid sequence of SEQ ID NO: 86-94, or 95. In certain embodiments, a VH sequence having at least 90%, 91%, 92%, 93%, 94%, 95%, 96%, 97%, 98%, or 99% identity contains substitutions (e.g., conservative substitutions), insertions, or deletions relative to the reference sequence, but an anti-myostatin antibody comprising that sequence retains the ability to bind to myostatin. In certain embodiments, a total of 1 to 10 amino acids have been substituted, inserted and/or deleted in SEQ ID NO: 86-94, or 95. In certain embodiments, substitutions, insertions, or deletions occur in regions outside the HVRs (i.e., in the FRs). Optionally, the anti-myostatin antibody comprises the VH sequence in SEQ ID NO: 86-94, or 95, including post-translational modifications of that sequence. In a particular embodiment, the VH comprises one, two or three HVRs selected from: (a) a HVR-H1 comprising the amino acid sequence of SEQ ID NO: 114, 115, or 126, (b) a HVR-H2 comprising the amino acid sequence of SEQ ID NO: 116-119, 120, or 127, and (c) a HVR-H3 comprising the amino acid sequence of SEQ ID NO:121 or 128. In some embodiments, the antibody further comprises the variant Fc region amino acid sequence of SEQ ID NO: 229-380, or 381.

[0220] In another aspect, an anti-myostatin antibody comprises a VH sequence having at least 90%, 91%, 92%, 93%, 94%, 95%, 96%, 97%, 98%, 99%, or 100% sequence identity to the amino acid sequence of SEQ ID NO: 86. In certain embodiments, a VH sequence having at least 90%, 91%, 92%, 93%, 94%, 95%, 96%, 97%, 98%, or 99% identity contains substitutions (e.g., conservative substitutions), insertions, or deletions relative to the reference sequence, but an anti-myostatin antibody comprising that sequence retains the ability to bind to myostatin. In certain embodiments, a total of 1 to 10 amino acids have been substituted, inserted and/or deleted in SEQ ID NO: 86. In certain embodiments, substitutions, insertions, or deletions occur in regions outside the HVRs (i.e., in the FRs). Optionally, the anti-myostatin antibody comprises the VH sequence in SEQ ID NO: 86, including post-translational modifications of that sequence. In a particular embodiment, the VH comprises one, two or three HVRs selected from: (a) a HVR-H1 comprising the amino acid sequence of SEQ ID NO: 114, (b) a HVR-H2 comprising the amino acid sequence of SEQ ID NO: 58, and (c) a HVR-H3 comprising the amino acid sequence of SEQ ID NO: 63. In some embodiments, the antibody further comprises the variant Fe region amino acid sequence of SEQ ID NO: 229-380, or 381.

[0221] In another aspect, an anti-myostatin antibody comprises a VH sequence having at least 90%, 91%, 92%, 93%, 94%, 95%, 96%, 97%, 98%, 99%, or 100% sequence identity to the amino acid sequence of SEQ ID NO: 92. In certain embodiments, a VH sequence having at least 90%, 91%, 92%, 93%, 94%, 95%, 96%, 97%, 98%, or 99% identity contains substitutions (e.g., conservative substitutions), insertions, or deletions relative to the reference sequence, but an anti-myostatin antibody comprising that sequence retains the ability to bind to myostatin. In certain embodiments, a total of 1 to 10 amino acids have been substituted, inserted and/or deleted in SEQ ID NO: 92. In certain embodiments, substitutions, insertions, or deletions occur in regions outside the HVRs (i.e., in the FRs). Optionally, the anti-myostatin antibody comprises the VH sequence in SEQ ID NO: 92, including post-translational modifications of that sequence. In a particular embodiment, the VI comprises one, two or three HVRs selected from: (a) a HVR-H1 comprising the amino acid sequence of SEQ ID NO: 114, (b) a HVR-H2 comprising the amino acid sequence of SEQ ID NO: 58, and (c) a HVR-H3 comprising the amino acid sequence of SEQ ID NO: 63. In some embodiments, the antibody further comprises the variant Fc region amino acid sequence of SEQ ID NO: 229-380, or 381.

[0222] In another aspect, an anti-myostatin antibody is provided, wherein the antibody comprises a VL having at least 90%, 91%, 92%, 93%, 94%, 95%, 96%, 97%, 98%, 99%, or 100% sequence identity to the amino acid sequence of SEQ ID NO:15, 31, 35-38, 96-98, or 99. In certain embodiments, a VL sequence having at least 90%, 91%, 92%, 93%, 94%, 95%, 96%, 97%, 98%, or 99% identity contains substitutions (e.g., conservative substitutions), insertions, or deletions relative to the reference sequence, but an anti-myostatin antibody comprising that sequence retains the ability to bind to myostatin. In certain embodiments, a total of 1 to 10 amino acids have been substituted, inserted and/or deleted in SEQ ID NO: 15, 31, 35-38, 96-98, or 99. In certain embodiments, the substitutions, insertions, or deletions occur in regions outside the HVRs (i.e., in the FRs). Optionally, the anti-myostatin antibody comprises the VL sequence in SEQ ID NO: 15, 31, 35-38, 96-98, or 99, including post-translational modifications of that sequence. In a particular embodiment, the VL comprises one, two or three HVRs selected from (a) a HVR-L1 comprising the amino acid sequence of SEQ ID NO: 65-69, 122-124, or 129; (b) a HVR-L2 comprising the amino acid sequence of SEQ ID NO: 70-72, 125, or 130; and (c) a HVR-L3 comprising the amino acid sequence of SEQ ID NO: 73, 74, or 131. In some embodiments, the antibody further comprises the variant Fc region amino acid sequence of SEQ ID NO: 229-380, or 381.

[0223] In another aspect, an anti-myostatin antibody is provided, wherein the antibody comprises a VL having at least 90%, 91%, 92%, 93%, 94%, 95%, 96%, 97%, 98%, 99%, or 100% sequence identity to the amino acid sequence of SEQ ID NO: 15, 31, 35, 36, 37, or 38. In certain embodiments, a VL sequence having at least 90%, 91%, 92%, 93%, 94%, 95%, 96%, 97%, 98%, or 99% identity contains substitutions (e.g., conservative substitutions), insertions, or deletions relative to the reference sequence, but an anti-myostatin antibody comprising that sequence retains the ability to bind to myostatin. In certain embodiments, a total of 1 to 10 amino acids have been substituted, inserted and/or deleted in SEQ ID NO: 15, 31, 35, 36, 37, or 38. In certain embodiments, the substitutions, insertions, or deletions occur in regions outside the HVRs (i.e., in the FRs). Optionally, the anti-myostatin antibody comprises the VL sequence in SEQ ID NO: 15, 31, 35, 36, 37, or 38, including post-translational modifications of that sequence. In a particular embodiment, the VL comprises one, two or three HVRs selected from (a) a HVR-L1 comprising the amino acid sequence of SEQ ID NO: 65, 66, 67, 68, or 69; (b) a HVR-L2 comprising the amino acid sequence of SEQ ID NO: 70, 71, or 72; and (c) a HVR-L3 comprising the amino acid sequence of SEQ ID NO: 73 or 74. In some embodiments, the antibody further comprises the variant Fc region amino acid sequence of SEQ ID NO: 229-380, or 381.

[0224] In another aspect, an anti-myostatin antibody is provided, wherein the antibody comprises a VL having at least 90%, 91%, 92%, 93%, 94%, 95%, 96%, 97%, 98%, 99%, or 100% sequence identity to the amino acid sequence of SEQ ID NO:96-98, or 99. In certain embodiments, a VL sequence having at least 90%, 91%, 92%, 93%, 94%, 95%, 96%, 97%, 98%, or 99% identity contains substitutions (e.g., conservative substitutions), insertions, or deletions relative to the reference sequence, but an anti-myostatin antibody comprising that sequence retains the ability to bind to myostatin. In certain embodiments, a total of 1 to 10 amino acids have been substituted, inserted and/or deleted in SEQ ID NO:96-98, or 99. In certain embodiments, the substitutions, insertions, or deletions occur in regions outside the HVRs. Optionally, the anti-myostatin antibody comprises the VL sequence in SEQ ID NO:96-98, or 99, including post-translational modifications of that sequence. In a particular embodiment, the VL comprises one, two or three HVRs selected from (a) a HVR-L1 comprising the amino acid sequence of SEQ ID NO: 122, 123, or 124, 129; (b) a HVR-L2 comprising the amino acid sequence of SEQ ID NO: 125 or 130; and (c) a HVR-L3 comprising the amino acid sequence of SEQ ID NO: 131.

[0225] In another aspect, an anti-myostatin antibody is provided, wherein the antibody comprises a VL having at least 90%, 91%, 92%, 93%, 94%, 95%, 96%, 97%, 98%, 99%, or 100% sequence identity to the amino acid sequence of SEQ ID NO: 96. In certain embodiments, a VL sequence having at least 90%, 91%, 92%, 93%, 94%, 95%, 96%, 97%, 98%, or 99% identity contains substitutions (e.g., conservative substitutions), insertions, or deletions relative to the reference sequence, but an anti-myostatin antibody comprising that sequence retains the ability to bind to myostatin. In certain embodiments, a total of 1 to 10 amino acids have been substituted, inserted and/or deleted in SEQ ID NO: 96. In certain embodiments, the substitutions, insertions, or deletions occur in regions outside the HVRs. Optionally, the anti-myostatin antibody comprises the VL sequence in SEQ ID NO: 96, including post-translational modifications of that sequence. In a particular embodiment, the VL comprises one, two or three HVRs selected from (a) a HVR-L1 comprising the amino acid sequence of SEQ ID NO: 122; (b) a HVR-L2 comprising the amino acid sequence of SEQ ID NO: 71; and (c) a HVR-L3 comprising the amino acid sequence of SEQ ID NO: 74. In some embodiments, the antibody further comprises the variant Fc region amino acid sequence of SEQ ID NO: 229-380, or 381.

[0226] In another aspect, an anti-myostatin antibody is provided, wherein the antibody comprises a VL having at least 90%, 91%, 92%, 93%, 94%, 95%, 96%, 97%, 98%, 99%, or 100% sequence identity to the amino acid sequence of SEQ ID NO: 97. In certain embodiments, a VL sequence having at least 90%, 91%, 92%, 93%, 94%, 95%, 96%, 97%, 98%, or 99% identity contains substitutions (e.g., conservative substitutions), insertions, or deletions relative to the reference sequence, but an anti-myostatin antibody comprising that sequence retains the ability to bind to myostatin. In certain embodiments, a total of 1 to 10 amino acids have been substituted, inserted and/or deleted in SEQ ID NO: 97. In certain embodiments, the substitutions, insertions, or deletions occur in regions outside the HVRs. Optionally, the anti-myostatin antibody comprises the VL sequence in SEQ ID NO: 97, including post-translational modifications of that sequence. In a particular embodiment, the VL comprises one, two or three HVRs selected from (a) a HVR-L1 comprising the amino acid sequence of SEQ ID NO: 123; (b) a HVR-L2 comprising the amino acid sequence of SEQ ID NO: 71; and (c) a HVR-L3 comprising the amino acid sequence of SEQ ID NO: 74. In some embodiments, the antibody further comprises the variant Fc region amino acid sequence of SEQ ID NO: 229-380, or 381.

[0227] In another aspect, an anti-myostatin antibody is provided, wherein the antibody comprises a VH as in any of the embodiments provided above, and a VL as in any of the embodiments provided above. In one embodiment, the antibody comprises the VH and VL sequences in SEQ ID NO: 13, 16-30, 32-34, 86-94, or 95 and SEQ ID NO:15, 31, 35-38, 96-98, or 99, respectively, including post-translational modifications of those sequences. In one embodiment, the antibody comprises the VH and VL sequences in SEQ ID NO: 13, 16-30, 32-34, 86-94, or 95 and SEQ ID NO: 15, 31, 35-38, 96-98, or 99, respectively, including post-translational modifications of those sequences. In one embodiment, the antibody comprises the VH and VL sequences in SEQ ID NO: 86-94, or 95 and SEQ ID NO:96-98, or 99, respectively, including post-translational modifications of those sequences. In some embodiments, the antibody further comprises the variant Fc region amino acid sequence of SEQ ID NO: 229-380, or 381.

[0228] In another aspect, an anti-myostatin antibody is provided, wherein the antibody comprises a VH as in any of the embodiments provided above, and a VL as in any of the embodiments provided above. In one embodiment, the antibody comprises the VH and VL sequences in SEQ ID NO: 13, 16-30, 32, 33, or 34 and SEQ ID NO:15, 31, 35-37, or 38, respectively, including post-translational modifications of those sequences. In one embodiment, the antibody comprises the VH and VL sequences in SEQ ID NO: 13, 16-30, 32, 33, or 34 and SEQ ID NO: 15, 31, 35-37, or 38, respectively, including post-translational modifications of those sequences. In some embodiments, the antibody further comprises the variant Fc region amino acid sequence of SEQ ID NO: 229-380, or 381.

[0229] In another aspect, an anti-myostatin antibody is provided, wherein the antibody comprises a VH as in any of the embodiments provided above, and a VL as in any of the embodiments provided above. In one embodiment, the antibody comprises the VH and VL sequences in SEQ ID NO: 86-94, or 95 and SEQ ID NO:96-98, or 99, respectively, including post-translational modifications of those sequences. In one embodiment, the antibody comprises the VH and VL sequences in SEQ ID NO: 86-94, or 95 and SEQ ID NO:96-98, or 99, respectively, including post-translational modifications of those sequences. In one embodiment, the antibody comprises the VH and VL sequences in SEQ ID NO: 86-94, or 95 and SEQ ID NO:96-98, or 99, respectively, including post-translational modifications of those sequences. In another aspect, an anti-myostatin antibody is provided, wherein the antibody comprises a VH as in any of the embodiments provided above, and a VL as in any of the embodiments provided above. In one embodiment, the antibody comprises the VH and VL sequences in SEQ ID NO: 86 and SEQ ID NO: 96, respectively, including post-translational modifications of those sequences. In one embodiment, the antibody comprises the VH and VL sequences in SEQ ID NO: 92 and SEQ ID NO: 97, respectively, including post-translational modifications of those sequences.

[0230] In another aspect, an anti-myostatin antibody comprises a VH sequence having at least 90%, 91%, 92%, 93%, 94%, 95%, 96%, 97%, 98%, 99%, or 100% sequence identity to the amino acid sequence of SEQ ID NO:12, 145-149, or 150. In certain embodiments, a VH sequence having at least 90%, 91%, 92%, 93%, 94%, 95%, 96%, 97%, 98%, or 99% identity contains substitutions (e.g., conservative substitutions), insertions, or deletions relative to the reference sequence, but an anti-myostatin antibody comprising that sequence retains the ability to bind to myostatin. In certain embodiments, a total of 1 to 10 amino acids have been substituted, inserted and/or deleted in SEQ ID NO:12, 145-149, or 150. In certain embodiments, substitutions, insertions, or deletions occur in regions outside the HVRs (i.e., in the FRs). Optionally, the anti-myostatin antibody comprises the VH sequence in SEQ ID NO: 12, 145-149, or 150, including post-translational modifications of that sequence. In a particular embodiment, the VH comprises one, two or three HVRs selected from: (a) a HVR-H1 comprising the amino acid sequence of SEQ ID NO:55, 157-161, or 162, (b) a HVR-H2 comprising the amino acid sequence of SEQ ID NO:55, 58, 163-167, or 168, and (c) a HVR-H3 comprising the amino acid sequence of SEQ ID NO: 61, 169-173, or 174.

[0231] In another aspect, an anti-myostatin antibody is provided, wherein the antibody comprises a light chain variable domain (VL) having at least 90%, 91%, 92%, 93%, 94%, 95%, 96%, 97%, 98%, 99%, or 100% sequence identity to the amino acid sequence of SEQ ID NO: 14, 151-155, or 156. In certain embodiments, a VL sequence having at least 90%, 91%, 92%, 93%, 94%, 95%, 96%, 97%, 98%, or 99% identity contains substitutions (e.g., conservative substitutions), insertions, or deletions relative to the reference sequence, but an anti-myostatin antibody comprising that sequence retains the ability to bind to myostatin. In certain embodiments, a total of 1 to 10 amino acids have been substituted, inserted and/or deleted in SEQ ID NO: 14, 151-155, or 156. In certain embodiments, the substitutions, insertions, or deletions occur in regions outside the HVRs (i.e., in the FRs). Optionally, the anti-myostatin antibody comprises the VL sequence in SEQ ID NO: 14, 151-155, or 156, including post-translational modifications of that sequence. In a particular embodiment, the VL comprises one, two or three HVRs selected from (a) a HVR-L1 comprising the amino acid sequence of SEQ ID NO: 65, 175-179, or 180; (b) a HVR-L2 comprising the amino acid sequence of SEQ ID NO: 70, 181-185, or 186; and (c) a HVR-L3 comprising the amino acid sequence of SEQ ID NO: 73, 187-191, or 192.

[0232] In another aspect, an anti-myostatin antibody is provided, wherein the antibody comprises a VH as in any of the embodiments provided above, and a VL as in any of the embodiments provided above. In one embodiment, the antibody comprises the VH and VL sequences in SEQ ID NO:12, 145-149, or 150 and SEQ ID NO: 14, 151-155, or 156, respectively, including post-translational modifications of those sequences.

[0233] In certain embodiments, an anti-myostatin antibody of the present invention comprises a VH as in any of the embodiments provided above and a heavy chain constant region comprising the amino acid sequence of SEQ ID NO: 7, 9, 11, 193, 195-198, 227, 228, 229-380 or 381. In certain embodiments, an anti-myostatin antibody of the present invention comprises a VL as in any of the embodiments provided above, and a light chain constant region comprising the amino acid sequence of SEQ ID NO: 8 or 10.

[0234] In a further aspect, the invention provides an antibody that binds to the same epitope as an anti-myostatin antibody provided herein. In a further aspect, the invention provides an antibody that binds to the same epitope as an antibody described in Table 2a. In a further aspect, the invention provides an antibody that binds to the same epitope as an antibody described in Tables 11a or 13. In certain embodiments, an antibody is provided that binds to an epitope within a fragment of myostatin propeptide consisting of amino acids 21-100 of SEQ ID NO: 78. Alternatively, the antibody binds a myostatin propeptide fragment consisting of amino acids 21-80, 41-100, 21-60, 41-80, 61-100, 21-40, 41-60, 61-80, or 81-100, of SEQ ID NO: 78.

[0235] In a further aspect of the invention, an anti-myostatin antibody according to any of the above embodiments is a monoclonal antibody, including a chimeric, humanized or human antibody. In one embodiment, an anti-myostatin antibody is an antibody fragment, e.g., a Fv, Fab, Fab′, scFv, diabody, or F(ab′)₂ fragment. In another embodiment, the antibody is a full length IgG antibody, e.g., an intact IgG1 or IgG4 antibody or other antibody class or isotype as defined herein.

[0236] In a further aspect, an anti-myostatin antibody according to any of the above embodiments may incorporate any of the features, singly or in combination, as described in Sections 1-7 below.

[0237] In a further aspect, an anti-myostatin antibody according to any of the above embodiments may incorporate an Fc variant region described in Section 8 below. In a further aspect, the anti-myostatin antibody comprises the amino acid sequence of SEQ ID NO: 229-380, or 381. In a further aspect, an anti-myostatin antibody according to any of the above embodiments may incorporate any of the features, singly or in combination, as described in Sections 1-8 below.

[0238] 1. Antibody Affinity

[0239] In certain embodiments, an antibody provided herein has a dissociation constant (Kd) of ≦1 M, ≦100 nM, ≦10 nM, ≦1 nM, ≦0.1 nM, ≦0.01 nM, or ≦0.001 nM (e.g., 10⁻⁸ M or less, e.g., from 10⁻⁸ M to 10⁻¹³ M, e.g., from 10⁻⁹ M to 10⁻¹³ M).

[0240] In one embodiment, Kd is measured by a radiolabeled antigen binding assay (RIA). In one embodiment, an RIA is performed with the Fab version of an antibody of interest and its antigen. For example, solution binding affinity of Fabs for antigen is measured by equilibrating Fab with a minimal concentration of (¹²⁵I)-labeled antigen in the presence of a titration series of unlabeled antigen, then capturing bound antigen with an anti-Fab antibody-coated plate (see, e.g., Chen et al., J. Mol. Biol. 293:865-881 (1999), which is herein incorporated by reference in its entirety). To establish conditions for the assay, MICROTITER® multi-well plates (Thermo Scientific) are coated overnight with 5 μg/ml of a capturing anti-Fab antibody (Cappel Labs) in 50 mM sodium carbonate (pH9.6), and subsequently blocked with 2% (w/v) bovine serum albumin in PBS for two to five hours at room temperature (approximately 23° C.). In a non-adsorbent plate (Nunc #269620), 100 pM or 26 pM [¹²⁵I]-antigen are mixed with serial dilutions of a Fab of interest (e.g., consistent with assessment of the anti-VEGF antibody, Fab-12, in Presta et al., Cancer Res. 57:4593-4599 (1997)). The Fab of interest is then incubated overnight; however, the incubation may continue for a longer period (e.g., about 65 hours) to ensure that equilibrium is reached. Thereafter, the mixtures are transferred to the capture plate for incubation at room temperature (e.g., for one hour). The solution is then removed and the plate washed eight times with 0.1% polysorbate 20 (TWEEN-20®) in PBS. When the plates have dried, 150 μl/well of scintillant (MICROSCINT-20™; Packard) is added, and the plates are counted on a TOPCOUNT™ M gamma counter (Packard) for ten minutes. Concentrations of each Fab that give less than or equal to 20% of maximal binding are chosen for use in competitive binding assays.

[0241] According to another embodiment, Kd is measured using a BIACORE® surface plasmon resonance assay. For example, an assay using a BIACORE®-2000 or a BIACORE®-3000 (BIACORE®, Inc., Piscataway, N.J.) is performed at 25° C. with immobilized antigen CM5 chips at ˜10 response units (RU). In one embodiment, carboxymethylated dextran biosensor chips (CM5, BIACORE®, Inc.) are activated with N-ethyl-N′-(3-dimethylaminopropyl)-carbodiimide hydrochloride (EDC) and N-hydroxysuccinimide (NHS) according to the supplier's instructions. Antigen is diluted with 10 mM sodium acetate, pH4.8, to 5 μg/ml (˜0.2 μM) before injection at a flow rate of 5 μl/minute to achieve approximately 10 response units (RU) of coupled protein. Following the injection of antigen, 1 M ethanolamine is injected to block unreacted groups. For kinetic measurements, two-fold serial dilutions of Fab (0.78 nM to 500 nM) are injected in PBS with 0.05% polysorbate 20 (TWEEN-20™) surfactant (PBST) at 25° C. at a flow rate of approximately 25 μl/min. Association rates (kₒₙ) and dissociation rates (k_{off}) are calculated using a simple one-to-one Langmuir binding model (BIACORE® Evaluation Software version 3.2) by simultaneously fitting the association and dissociation sensorgrams. The equilibrium dissociation constant (Kd) is calculated as the ratio k_{off}/kₒₙ See, e.g., Chen et al., J. Mol. Biol. 293:865-881 (1999). If the on-rate exceeds 10⁶ M⁻¹ s⁻¹ by the surface plasmon resonance assay above, then the on-rate can be determined using a fluorescent quenching technique that measures the increase or decrease in fluorescence emission intensity (excitation=295 nm; emission=340 nm, 16 nm band-pass) at 25° C. of a 20 nM anti-antigen antibody (Fab form) in PBS, pH7.2, in the presence of increasing concentrations of antigen as measured in a spectrometer, such as a stop-flow equipped spectrophotometer (Aviv Instruments) or a 8000-series SLM-AMINCO™ spectrophotometer (ThermoSpectronic) with a stirred cuvette.

[0242] 2. Antibody Fragments

[0243] In certain embodiments, an antibody provided herein is an antibody fragment. Antibody fragments include, but are not limited to, Fab, Fab′, Fab′-SH, F(ab′)₂, Fv, and scFv fragments, and other fragments described below. For a review of certain antibody fragments, see Hudson et al. Nat. Med. 9:129-134 (2003). For a review of scFv fragments, see, e.g., Pluckthün, in The Pharmacology of Monoclonal Antibodies, vol. 113, Rosenburg and Moore eds., (Springer-Verlag, New York), pp. 269-315 (1994); see also, WO 1993/16185; and U.S. Pat. Nos. 5,571,894 and 5,587,458. For discussion of Fab and F(ab′)₂ fragments comprising salvage receptor binding epitope residues and having increased in vivo half-life, see U.S. Pat. No. 5,869,046. The contents of each of the above publications is herein incorporated by reference in its entirety.

[0244] Diabodies are antibody fragments with two antigen-binding sites that may be bivalent or bispecific. See, for example, EP 404,097; WO 1993/01161; Hudson et al., Nat. Med. 9:129-134 (2003); and Hollinger et al., Proc. Natl. Acad. Sci. USA 90:6444-6448 (1993). Triabodies and tetrabodies are also described in Hudson et al., Nat. Med. 9:129-134 (2003).

[0245] Single-domain antibodies are antibody fragments comprising all or a portion of the heavy chain variable domain or all or a portion of the light chain variable domain of an antibody. In certain embodiments, a single-domain antibody is a human single-domain antibody (Domantis, Inc., Waltham, Mass.; see, e.g., U.S. Pat. No. 6,248,516.

[0246] Antibody fragments can be made by various techniques, including but not limited to proteolytic digestion of an intact antibody as well as production by recombinant host cells (e.g., E. coli or phage), as described herein.

[0247] 3. Chimeric and Humanized Antibodies

[0248] In certain embodiments, an antibody provided herein is a chimeric antibody. Certain chimeric antibodies are described, e.g., in U.S. Pat. No. 4,816,567; and Morrison et al., Proc. Natl. Acad. Sci. USA 81:6851-6855 (1984), each of which is herein incorporated by reference in its entirety). In one example, a chimeric antibody comprises a non-human variable region (e.g., a variable region derived from a mouse, rat, hamster, rabbit, or non-human primate, such as a monkey) and a human constant region. In a further example, a chimeric antibody is a “class switched” antibody in which the class or subclass has been changed from that of the parent antibody. Chimeric antibodies include antigen-binding fragments thereof.

[0249] In certain embodiments, a chimeric antibody is a humanized antibody. Typically, a non-human antibody is humanized to reduce immunogenicity to humans, while retaining the specificity and affinity of the parental non-human antibody. Generally, a humanized antibody comprises one or more variable domains in which HVRs, e.g., CDRs, (or portions thereof) are derived from a non-human antibody, and FRs (or portions thereof) are derived from human antibody sequences. A humanized antibody optionally will also comprise at least a portion of a human constant region. In some embodiments, some FR residues in a humanized antibody are substituted with corresponding residues from a non-human antibody (e.g., the antibody from which the HVR residues are derived), e.g., to restore or improve antibody specificity or affinity.

[0250] Humanized antibodies and methods of making them are reviewed, e.g., in Almagro, Front. Biosci. 13:1619-1633 (2008), and are further described, e.g., in Riechmann et al., Nature 332:323-329 (1988); Queen et al., Proc. Nat'l Acad. Sci. USA 86:10029-10033 (1989); U.S. Pat. Nos. 5,821,337, 7,527,791, 6,982,321, and 7,087,409; Kashmiri et al., Methods 36:25-34 (2005) (describing specificity determining region (SDR) grafting); Padlan, Mol. Immunol. 28:489-498 (1991) (describing “resurfacing”); Dall'Acqua et al., Methods 36:43-60 (2005) (describing “FR shuffling”); and Osbourn et al., Methods 36:61-68 (2005) and Klimka et al., Br. J. Cancer, 83:252-260 (2000) (describing the “guided selection” approach to FR shuffling), the contents of each of which is herein incorporated by reference in its entirety.

[0251] Human framework regions that may be used for humanization include but are not limited to: framework regions selected using the “best-fit” method (see, e.g., Sims et al. J. Immunol. 151:2296 (1993)); framework regions derived from the consensus sequence of human antibodies of a particular subgroup of light or heavy chain variable regions (see, e.g., Carter et al., Proc. Natl. Acad. Sci. USA 89:4285 (1992); and Presta et al. J. Immunol. 151:2623 (1993)); human mature (somatically mutated) framework regions or human germline framework regions (see, e.g., Almagro and Fransson, Front. Biosci. 13:1619-1633 (2008)); and framework regions derived from screening FR libraries (see, e.g., Baca et al., J. Biol. Chem. 272:10678-10684 (1997) and Rosok et al., J. Biol. Chem. 271:22611-22618 (1996)), each of which is herein incorporated by reference in its entirety.

[0252] 4. Human Antibodies

[0253] In certain embodiments, an antibody provided herein is a human antibody. Human antibodies can be produced using various techniques known in the art. Human antibodies are described generally in van Dijk and van de Winkel, Curr. Opin. Pharmacol. 5:368-374 (2001) and Lonberg, Curr. Opin. Immunol. 20:450-459 (2008).

[0254] Human antibodies may be prepared by administering an immunogen to a transgenic animal that has been modified to produce intact human antibodies or intact antibodies with human variable regions in response to antigenic challenge. Such animals typically contain all or a portion of the human immunoglobulin loci, which replace the endogenous immunoglobulin loci, or which are present extrachromosomally or integrated randomly into the animal's chromosomes. In such transgenic mice, the endogenous immunoglobulin loci have generally been inactivated. For review of methods for obtaining human antibodies from transgenic animals, see Lonberg, Nat. Biotech. 23:1117-1125 (2005). See also, e.g., U.S. Pat. Nos. 6,075,181 and 6,150,584 describing XENOMOUSE™ technology; U.S. Pat. No. 5,770,429 describing HUMAB® technology; U.S. Pat. No. 7,041,870 describing K-M MOUSE® technology, and US Patent Application Publication No. US 2007/0061900, describing VELOCIMOUSE® technology). Human variable regions from intact antibodies generated by such animals may be further modified, e.g., by combining with a different human constant region.

[0255] Human antibodies can also be made by hybridoma-based methods. Human myeloma and mouse-human heteromyeloma cell lines for the production of human monoclonal antibodies have been described. (See, e.g., Kozbor J. Immunol., 133:3001 (1984); Brodeur et al., Monoclonal Antibody Production Techniques and Applications, pp. 51-63 (Marcel Dekker, Inc., New York, 1987); and Boerner et al., J. Immunol. 147:86 (1991).) Human antibodies generated via human B-cell hybridoma technology are also described in Li et al., Proc. Natl. Acad. Sci. USA 103:3557-3562 (2006). Additional methods include those described, for example, in U.S. Pat. No. 7,189,826 (describing production of monoclonal human IgM antibodies from hybridoma cell lines) and Ni, Xiandai Mianyixue 26(4):265-268 (2006) (describing human-human hybridomas). Human hybridoma technology (Trioma technology) is also described in Vollmers and Brandlein, Histology and Histopathology 20(3):927-937 (2005) and Vollmers and Brandlein, Methods and Findings in Experimental and Findings in Experimental and Clinical Pharmacology 27(3):185-191 (2005).

[0256] Human antibodies may also be generated by isolating Fv clone variable domain sequences selected from human-derived phage display libraries. Such variable domain sequences may then be combined with a desired human constant domain. Techniques for selecting human antibodies from antibody libraries are described below.

[0257] 5. Library-Derived Antibodies

[0258] Antibodies of the invention may be isolated by screening combinatorial libraries for antibodies with the desired activity or activities. For example, a variety of methods are known in the an for generating phage display libraries and screening such libraries for antibodies possessing the desired binding characteristics. Such methods are reviewed, e.g., in Hoogenboom et al. in Methods in Molecular Biology 178:1-37 (2000); O'Brien et al., ed., Human Press, Totowa, N. J., 2001) and further described, e.g., in the McCafferty et al., Nature 348:552-554; Clackson et al., Nature 352:624-628 (1991); Marks et al., J. Mol. Biol. 222:581-597 (1992); Marks and Bradbury, in Methods in Molecular Biology 248:161-175 (Lo, ed., Human Press, Totowa, N. J., 2003); Sidhu et al., J. Mol. Biol. 338(2):299-310 (2004); Lee et al., J. Mol. Biol. 340(5):1073-1093 (2004); Fellouse, Proc. Natl. Acad. Sci. USA 101(34):12467-12472 (2004); and Lee et al., J. Immunol. Methods 284(1-2): 119-132 (2004).

[0259] In certain phage display methods, repertoires of VH and VL genes are separately cloned by polymerase chain reaction (PCR) and recombined randomly in phage libraries, which can then be screened for antigen-binding phage as described in Winter et al., Ann. Rev. Immunol. 12:433-455 (1994). Phage typically display antibody fragments, either as single-chain Fv (scFv) fragments or as Fab fragments. Libraries from immunized sources provide high-affinity antibodies to the immunogen without the requirement of constructing hybridomas. Alternatively, the naive repertoire can be cloned (e.g., from human) to provide a single source of antibodies to a wide range of non-self and also self antigens without any immunization as described by Griffiths et al., EMBO J, 12:725-734 (1993). Finally, naive libraries can also be made synthetically by cloning unrearranged V-gene segments from stem cells, and using PCR primers containing random sequence to encode the highly variable CDR3 regions and to accomplish rearrangement in vitro, as described by Hoogenboom and Winter, J. Mol. Biol. 227:381-388 (1992). Patent publications describing human antibody phage libraries include, for example: U.S. Pat. No. 5,750,373, and US Publ. Nos. 2005/0079574, 2005/0119455, 2005/0266000, 2007/0117126, 2007/0160598, 2007/0237764, 2007/0292936, and 2009/0002360.

[0260] Antibodies or antibody fragments isolated from human antibody libraries are considered human antibodies or human antibody fragments herein.

[0261] 6. Multispecific Antibodies

[0262] In certain embodiments, an antibody provided herein is a multispecific antibody, e.g., a bispecific antibody. Multispecific antibodies are monoclonal antibodies that have binding specificities for at least two different sites. In certain embodiments, one of the binding specificities is for myostatin and the other is for any other antigen. In certain embodiments, bispecific antibodies may bind to two different epitopes of myostatin. Bispecific antibodies may also be used to localize cytotoxic agents to cells which express myostatin. Bispecific antibodies can be prepared as full length antibodies or antibody fragments.

[0263] Techniques for making multispecific antibodies include, but are not limited to, recombinant co-expression of two immunoglobulin heavy chain-light chain pairs having different specificities (see, Milstein and Cuello, Nature 305:537 (1983)), WO 1993/08829, and Traunecker et al., EMBO J. 10: 3655 (1991)), and “knob-in-hole” engineering (see, e.g., U.S. Pat. No. 5,731,168). Multi-specific antibodies may also be made by engineering electrostatic steering effects for making antibody Fc-heterodimeric molecules (WO 2009/089004A1); cross-linking two or more antibodies or fragments (see, e.g., U.S. Pat. No. 4,676,980, and Brennan et al., Science, 229:81 (1985)); using leucine zippers to produce bi-specific antibodies (see, e.g., Kostelny et al., J. Immunol. 148(5):1547-1553 (1992)); using “diabody” technology for making bispecific antibody fragments (see, e.g., Hollinger et al., Proc. Natl. Acad. Sci. USA 90:6444-6448 (1993)); and using single-chain Fv (sFv) dimers (see, e.g., Gruber et al., J. Immunol. 152:5368 (1994)); and preparing trispecific antibodies as described, e.g., in Tutt et al., J. Immunol. 147:60 (1991).

[0264] Engineered antibodies with three or more functional antigen binding sites, including “Octopus antibodies,” are also included herein (see, e.g., US 2006/0025576A1).

[0265] The antibody or fragment herein also includes a “Dual Acting FAb” or “DAF” comprising an antigen binding site that binds to myostatin as well as another, different antigen (see, US 2008/0069820, for example).

[0266] 7. Antibody Variants

[0267] In certain embodiments, amino acid sequence variants of the antibodies provided herein are contemplated. For example, it may be desirable to improve the binding affinity and/or other biological properties of the antibody. Amino acid sequence variants of an antibody may be prepared by introducing appropriate modifications into the nucleotide sequence encoding the antibody, or by peptide synthesis. Such modifications include, for example, deletions from, and/or insertions into and/or substitutions of residues within the amino acid sequences of the antibody. Any combination of deletion, insertion, and substitution can be made to arrive at the final construct, provided that the final construct possesses the desired characteristics, e.g., antigen-binding.

[0268] a. Substitution, Insertion, and Deletion Variants

[0269] In certain embodiments, antibody variants having one or more amino acid substitutions are provided. Sites of interest for substitutional mutagenesis include the HVRs and FRs. Conservative substitutions are shown in Table 1 under the heading of “preferred substitutions.” More substantial changes are provided in Table 1 under the heading of “exemplary substitutions,” and as further described below in reference to amino acid side chain classes. Amino acid substitutions may be introduced into an antibody of interest and the products screened for a desired activity, e.g., retained/improved antigen binding, decreased immunogenicity, or improved ADCC or CDC.

TABLE 1

| Original | Exemplary | Preferred |
|---|---|---|
| Residue | Substitutions | Substitution |
| Ala (A) | Val; Leu; Ile | Val |
| Arg (R) | Lys; Gln; Asn | Lys |
| Asn (N) | Gln; His; Asp, Lys; Arg | Gln |
| Asp (D) | Glu; Asn | Glu |
| Cys (C) | Ser; Ala | Ser |
| Gln (Q) | Asn; Glu | Asn |
| Glu (E) | Asp; Gln | Asp |
| Gly (G) | Ala | Ala |
| His (H) | Asn; Gln; Lys; Arg | Arg |
| Ile (I) | Leu; Val: Met; Ala; Phe; Norleucine | Leu |
| Leu (L) | Norleucine; Ile; Val; Met; Ala; Phe | Ile |
| Lys (K) | Arg; Gln; Asn | Arg |
| Met (M) | Leu; Phe; Ile | Leu |
| Phe (F) | Trp; Leu; Val; Ile; Ala; Tyr | Tyr |
| Pro (P) | Ala | Ala |
| Ser (S) | Thr | Thr |
| Thr (T) | Val; Ser | Ser |
| Trp (W) | Tyr; Phe | Tyr |
| Tyr (Y) | Trp; Phe; Thr; Ser | Phe |
| Val (V) | Ile; Leu; Met; Phe; Ala; Norleucine | Leu |

[0270] Amino acids may be grouped according to common side-chain properties: (1) hydrophobic: Norleucine, Met, Ala, Val, Leu, lie; (2) neutral hydrophilic: Cys, Ser, Thr, Asn, Gln; (3) acidic: Asp, Glu; (4) basic: His, Lys, Arg; (5) residues that influence chain orientation: Gly, Pro; and (6) aromatic: Trp, Tyr, Phe. Non-conservative substitutions will entail exchanging a member of one of these groups for a member of another group.

[0271] One type of substitutional variant involves substituting one or more hypervariable region residues of a parent antibody (e.g., a humanized or human antibody). Generally, the resulting variant(s) selected for further study will have modifications (e.g., improvements) in certain biological properties (e.g., increased affinity, reduced immunogenicity) relative to the parent antibody and/or will have substantially retained certain biological properties of the parent antibody. An exemplary substitutional variant is an affinity matured antibody, which may be conveniently generated, e.g., using phage display-based affinity maturation techniques such as those described herein. Briefly, one or more HVR residues are mutated and the variant antibodies displayed on phage and screened for a particular biological activity (e.g., binding affinity).

[0272] Alterations (e.g., substitutions) may be made in HVRs, e.g., to improve antibody affinity. Such alterations may be made in HVR “hotspots,” i.e., residues encoded by codons that undergo mutation at high frequency during the somatic maturation process (see, e.g., Chowdhury, Methods Mol. Biol. 207:179-196 (2008)), and/or residues that contact antigen, with the resulting variant VH or VL being tested for binding affinity. Affinity maturation by constructing and reselecting from secondary libraries has been described, e.g., in Hoogenboom et al. in Methods in Molecular Biology 178:1-37 (O'Brien et al., ed., Human Press, Totowa, N.J., (2001).) In some embodiments of affinity maturation, diversity is introduced into the variable genes chosen for maturation by any of a variety of methods (e.g., error-prone PCR, chain shuffling, or oligonucleotide-directed mutagenesis). A secondary library is then created. The library is then screened to identify any antibody variants with the desired affinity. Another method to introduce diversity involves HVR-directed approaches, in which several HVR residues (e.g., 4-6 residues at a time) are randomized. HVR residues involved in antigen binding may be specifically identified, e.g., using alanine scanning mutagenesis or modeling. CDR-H3 and CDR-L3 in particular are often targeted.

[0273] In certain embodiments, substitutions, insertions, or deletions may occur within one or more HVRs so long as such alterations do not substantially reduce the ability of the antibody to bind antigen. For example, conservative alterations (e.g., conservative substitutions as provided herein) that do not substantially reduce binding affinity may be made in HVRs. Such alterations may, for example, be outside of antigen contacting residues in the HVRs. In certain embodiments of the variant VH and VL sequences provided above, each HVR either is unaltered, or contains no more than one, two or three amino acid substitutions.

[0274] A useful method for identification of residues or regions of an antibody that may be targeted for mutagenesis is called “alanine scanning mutagenesis” as described by Cunningham and Wells, Science 244:1081-1085 (1989). In this method, a residue or group of target residues (e.g., charged residues such as arg, asp, his, lys, and glu) are identified and replaced by a neutral or negatively charged amino acid (e.g., alanine or polyalanine) to determine whether the interaction of the antibody with antigen is affected. Further substitutions may be introduced at the amino acid locations demonstrating functional sensitivity to the initial substitutions. Alternatively, or additionally, a crystal structure of an antigen-antibody complex to identify contact points between the antibody and antigen. Such contact residues and neighboring residues may be targeted or eliminated as candidates for substitution. Variants may be screened to determine whether they contain the desired properties.

[0275] Amino acid sequence insertions include amino- and/or carboxyl-terminal fusions ranging in length from one residue to polypeptides containing a hundred or more residues, as well as intrasequence insertions of single or multiple amino acid residues. Examples of terminal insertions include an antibody with an N-terminal methionyl residue. Other insertional variants of the antibody molecule include the fusion to the N- or C-terminus of the antibody to an enzyme (e.g., for ADEPT) or a polypeptide which increases the serum half-life of the antibody.

[0276] b. Glycosylation Variants

[0277] In certain embodiments, an antibody provided herein is altered to increase or decrease the extent to which the antibody is glycosylated. Addition or deletion of glycosylation sites to an antibody may be conveniently accomplished by altering the amino acid sequence such that one or more glycosylation sites is created or removed.

[0278] Where the antibody comprises an Fc region, the carbohydrate attached thereto may be altered. Native antibodies produced by mammalian cells typically comprise a branched, biantennary oligosaccharide that is generally attached by an N-linkage to Asn297 of the CH2 domain of the Fc region. See, e.g., Wright et al., TIBTECH 15:26-32 (1997). The oligosaccharide may include various carbohydrates, e.g., mannose, N-acetyl glucosamine (GlcNAc), galactose, and sialic acid, as well as a fucose attached to a GlcNAc in the “stem” of the biantennary oligosaccharide structure. In some embodiments, modifications of the oligosaccharide in an antibody of the invention may be made in order to create antibody variants with certain improved properties.

[0279] In one embodiment, antibody variants are provided having a carbohydrate structure that lacks fucose attached (directly or indirectly) to an Fc region. For example, the amount of fucose in such antibody may be from 1% to 80%, from 1% to 65%, from 5% to 65% or from 20% to 40%. The amount of fucose is determined by calculating the average amount of fucose within the sugar chain at Asn297, relative to the sum of all glycostructures attached to Asn 297 (e. g. complex, hybrid and high mannose structures) as measured by MALDI-TOF mass spectrometry, as described in WO 2008/077546, for example. Asn297 refers to the asparagine residue located at about position 297 in the Fc region (Eu numbering of Fc region residues); however, Asn297 may also be located about ±3 amino acids upstream or downstream of position 297, i.e., between positions 294 and 300, due to minor sequence variations in antibodies. Such fucosylation variants may have improved ADCC function. See, e.g., US Publ. Nos. US 2003/0157108 (Presta, L.); US 2004/0093621 (Kyowa Hakko Kogyo Co., Ltd). Examples of publications related to “defucosylated” or “fucose-deficient” antibody variants include: US 2003/0157108; WO 2000/61739; WO 2001/29246; US 2003/0115614; US 2002/0164328; US 2004/0093621; US 2004/0132140; US 2004/0110704; US 2004/0110282; US 2004/0109865; WO 2003/085119; WO 2003/084570; WO 2005/035586; WO 2005/035778; WO 2005/053742; WO 2002/031140; Okazaki et al., J. Mol. Biol. 336:1239-1249 (2004); Yamane-Ohnuki et al., Biotech. Bioeng. 87:614 (2004). Examples of cell lines capable of producing defucosylated antibodies include Lec13 CHO cells deficient in protein fucosylation (Ripka et al., Arch. Biochem. Biophys. 249:533-545 (1986); US Pat Appl No US 2003/0157108 A1, Presta, L; and WO 2004/056312, Adams et al., especially at Example 11), and knockout cell lines, such as alpha-1,6-fucosyltransferase gene, FUT8, knockout CHO cells (see, e.g., Yamane-Ohnuki et al., Biotech. Bioeng. 87:614 (2004); Kanda et al., Biotechnol. Bioeng. 94(4):680-688 (2006); and WO 2003/085107).

[0280] Antibodies variants are further provided with bisected oligosaccharides, e.g., in which a biantennary oligosaccharide attached to the Fc region of the antibody is bisected by GlcNAc. Such antibody variants may have reduced fucosylation and/or improved ADCC function. Examples of such antibody variants are described, e.g., in WO 2003/011878 (Jean-Mairet et al.); U.S. Pat. No. 6,602,684 (Umana et al.); and US 2005/0123546 (Umana et al.). Antibody variants with at least one galactose residue in the oligosaccharide attached to the Fc region are also provided. Such antibody variants may have improved CDC function. Such antibody variants are described, e.g., in WO 1997/30087 (Patel et al.); WO 1998/58964 (Raju, S.); and WO 1999/22764 (Raju, S.).

[0281] c. Fc Region Variants

[0282] In certain embodiments, one or more amino acid modifications may be introduced into the Fc region of an antibody provided herein, thereby generating an Fc region variant. The Fc region variant may comprise a human Fc region sequence (e.g., a human IgG1, IgG2, IgG3 or IgG4 Fc region) comprising an amino acid modification (e.g., a substitution) at one or more amino acid positions.

[0283] In certain embodiments, the invention contemplates an antibody variant that possesses some but not all effector functions, which make it a desirable candidate for applications in which the half life of the antibody in vivo is important yet certain effector functions (such as complement and ADCC) are unnecessary or deleterious. In vitro and/or in vivo cytotoxicity assays can be conducted to confirm the reduction/depletion of CDC and/or ADCC activities. For example, Fc receptor (FcR) binding assays can be conducted to ensure that the antibody lacks FcγR binding (hence likely lacking ADCC activity), but retains FcRn binding ability. The primary cells for mediating ADCC, NK cells, express FcγRIII only, whereas monocytes express FcγRI, FcγRII and FcγRIII. FcR expression on hematopoietic cells is summarized in Table 3 on page 464 of Ravetch and Kinet, Annu. Rev. Immunol. 9:457-492 (1991). Non-limiting examples of in vitro assays to assess ADCC activity of a molecule of interest is described in U.S. Pat. No. 5,500,362 (see, e.g., Hellstrom, et al. Proc. Nat'l Acad. Sci. USA 83:7059-7063 (1986)) and Hellstrom, I et al., Proc. Natl Acad. Sci. USA 82:1499-1502 (1985); U.S. Pat. No. 5,821,337 (see Bruggemann, et al., J. Exp. Med. 166:1351-1361 (1987)). Alternatively, non-radioactive assays methods may be employed (see, for example, ACTI™ non-radioactive cytotoxicity assay for flow cytometry (CellTechnology, Inc. Mountain View, Calif.); and CytoTox 96® non-radioactive cytotoxicity assay (Promega, Madison, Wis.)). Useful effector cells for such assays include peripheral blood mononuclear cells (PBMC) and Natural Killer (NK) cells. Alternatively, or additionally, ADCC activity of the molecule of interest may be assessed in vivo, e.g., in an animal model such as that disclosed in Clynes et al. Proc. Nat'l Acad. Sci. USA 95:652-656 (1998). C1q binding assays may also be carried out to confirm that the antibody is unable to bind C1q and hence lacks CDC activity. See, e.g., C1q and C3c binding ELISA in WO 2006/029879 and WO 2005/100402. To assess complement activation, a CDC assay may be performed (see, for example, Gazzano-Santoro et al., J. Immunol. Methods 202:163 (1996); Cragg et al., Blood 101:1045-1052 (2003); and Cragg, Blood 103:2738-2743 (2004)). FcRn binding and in vivo clearance/half life determinations can also be performed using methods known in the art (see, e.g., Petkova et al., Int'l. Immunol. 18(12):I759-I769 (2006)).

[0284] Antibodies with reduced effector function include those with substitution of one or more of Fc region residues 238, 265, 269, 270, 297, 327 and 329 (U.S. Pat. No. 6,737,056). Such Fc mutants include Fc mutants with substitutions at two or more of amino acid positions 265, 269, 270, 297 and 327, including the so-called “DANA” Fc mutant with substitution of residues 265 and 297 to alanine (U.S. Pat. No. 7,332,581).

[0285] Certain antibody variants with improved or diminished binding to FcRs are described. (See, e.g., U.S. Pat. No. 6,737,056; WO 2004/056312, and Shields et al., J Biol. Chem. 9(2): 6591-6604 (2001).)

[0286] In certain embodiments, an antibody variant comprises an Fc region with one or more amino acid substitutions which improve ADCC, e.g., substitutions at positions 298, 333, and/or 334 of the Fc region (EU numbering of residues).

[0287] In some embodiments, alterations are made in the Fc region that result in altered (i.e., either improved or diminished) C1q binding and/or Complement Dependent Cytotoxicity (CDC), e.g., as described in U.S. Pat. No. 6,194,551, WO 1999/51642, and Idusogie et al., J. Immunol. 164:4178-4184 (2000).

[0288] Antibodies with increased half lives and improved binding to the neonatal Fe receptor (FcRn), which is responsible for the transfer of maternal IgGs to the fetus (Guyer et al., J. Immunol. 117:587 (1976) and Kim et al., J. Immunol. 24:249 (1994)), are described in US2005/0014934A1 (Hinton et al.). Those antibodies comprise an Fc region with one or more substitutions therein which improve binding of the Fc region to FcRn. Such Fc variants include those with substitutions at one or more of Fc region residues: 238, 256, 265, 272, 286, 303, 305, 307, 311, 312, 317, 340, 356, 360, 362, 376, 378, 380, 382, 413, 424 or 434, e.g., substitution of Fc region residue 434 (U.S. Pat. No. 7,371,826). See also, Duncan, Nature 322:738-40 (1988); U.S. Pat. Nos. 5,648,260 and 5,624,821; and WO 1994/29351 concerning other examples of Fc region variants.

[0289] d. Cysteine Engineered Antibody Variants

[0290] In certain embodiments, it may be desirable to create cysteine engineered antibodies, e.g., “thioMAbs,” in which one or more residues of an antibody are substituted with cysteine residues. In particular embodiments, the substituted residues occur at accessible sites of the antibody. By substituting those residues with cysteine, reactive thiol groups are thereby positioned at accessible sites of the antibody and may be used to conjugate the antibody to other moieties, such as drug moieties or linker-drug moieties, to create an immunoconjugate, as described further herein. In certain embodiments, any one or more of the following residues may be substituted with cysteine: V205 (Kabat numbering) of the light chain; A118 (EU numbering) of the heavy chain; and S400 (EU numbering) of the heavy chain Fc region. Cysteine engineered antibodies may be generated as described, e.g., in U.S. Pat. No. 7,521,541.

[0291] e. Antibody Derivatives

[0292] In certain embodiments, an antibody provided herein may be further modified to contain additional nonproteinaceous moieties that are known in the art and readily available. The moieties suitable for derivatization of the antibody include but are not limited to water soluble polymers. Non-limiting examples of water soluble polymers include, but are not limited to, polyethylene glycol (PEG), copolymers of ethylene glycol/propylene glycol, carboxymethylcellulose, dextran, polyvinyl alcohol, polyvinyl pyrrolidone, poly-1, 3-dioxolane, poly-1,3,6-trioxane, ethylene/maleic anhydride copolymer, polyaminoacids (either homopolymers or random copolymers), and dextran or poly(n-vinyl pyrrolidone)polyethylene glycol, propropylene glycol homopolymers, prolypropylene oxide/ethylene oxide co-polymers, polyoxyethylated polyols (e.g., glycerol), polyvinyl alcohol, and mixtures thereof. Polyethylene glycol propionaldehyde may have advantages in manufacturing due to its stability in water. The polymer may be of any molecular weight, and may be branched or unbranched. The number of polymers attached to the antibody may vary, and if more than one polymer are attached, they can be the same or different molecules. In general, the number and/or type of polymers used for derivatization can be determined based on considerations including, but not limited to, the particular properties or functions of the antibody to be improved, whether the antibody derivative will be used in a therapy under defined conditions, etc.

[0293] In another embodiment, conjugates of an antibody and nonproteinaceous moiety that may be selectively heated by exposure to radiation are provided. In one embodiment, the nonproteinaceous moiety is a carbon nanotube (Kam et al., Proc. Natl. Acad. Sci. USA 102:11600-11605 (2005)). The radiation may be of any wavelength, and includes, but is not limited to, wavelengths that do not harm ordinary cells, but which heat the nonproteinaceous moiety to a temperature at which cells proximal to the antibody-nonproteinaceous moiety are killed.

[0294] 8. Variant Fc Regions

[0295] In one aspect, the invention provides an isolated polypeptide comprising a variant Fc region with enhanced FcγRIIb-binding activity. In some aspects, the polypeptide is an antibody. In some aspects, the polypeptide is an Fc fusion protein. In certain embodiments, the variant Fc region comprises at least one amino acid residue alteration (e.g., substitution) compared to the corresponding sequence in the Fc region of a native or reference variant sequence (sometimes collectively referred to herein as a “parent” Fc region). In certain embodiments, the variant Fc region of the invention has enhanced binding activity for monkey FcγRIIb compared to the parent Fc region. In particular embodiments, the monkey FcγRIIb is cynomolgus monkey FcγRIIb (SEQ ID NO: 223).

[0296] In certain embodiments, the ratio of [KD value of a parent Fc region for monkey FcγRIIb]/[KD value of a variant Fc region for monkey FcγRIIb] can be 2.0 or greater, 3.0 or greater, 4.0 or greater, 5.0 or greater, 6.0 or greater, 7.0 or greater, 8.0 or greater, 9.0 or greater, 10 or greater, 15 or greater, 20 or greater, 25 or greater, 30 or greater, 40 or greater, or 50 or greater. In further embodiments, the variant Fc region has decreased binding activity for monkey FcγRIIIa. In certain embodiments, the ratio of [KD value of a parent Fc region for monkey FcγRIIIa]/[KD value of a variant Fc region for monkey FcγRIIIa] can be 0.50 or smaller, 0.40 or smaller, 0.30 or smaller, 0.20 or smaller, 0.10 or smaller, 0.09 or smaller, 0.08 or smaller, 0.07 or smaller, 0.06 or smaller, 0.05 or smaller, 0.04 or smaller, 0.03 or smaller, 0.02 or smaller, or 0.01 or smaller. In certain embodiments, the monkey FcγRIIb has the sequence of SEQ ID NO:223 (cynomolgous monkey). In certain embodiments, the monkey FcγRIIIa has the sequence of SEQ ID NO:224 (cynomolgous monkey).

[0297] In further embodiments, the variant Fc region has enhanced binding activity for human FcγRIIb. In certain embodiments, the ratio of [KD value of a parent Fc region for human FcγRIIb]/[KD value of a variant Fc region for human FcγRIIb] can be 2.0 or greater, 3.0 or greater, 4.0 or greater, 5.0 or greater, 6.0 or greater, 7.0 or greater, 8.0 or greater, 9.0 or greater, 10 or greater, 15 or greater, 20 or greater, 25 or greater, 30 or greater, 40 or greater, or 50 or greater. In further embodiments, the variant Fc region has decreased binding activity for human FcγRIIIa. In certain embodiments, the ratio of [KD value of a parent Fc region for human FcγRIIIa]/[KD value of a variant Fc region for human FcγRIIIa] can be 0.50 or smaller, 0.40 or smaller, 0.30 or smaller, 0.20 or smaller, 0.10 or smaller, 0.09 or smaller, 0.08 or smaller, 0.07 or smaller, 0.06 or smaller, 0.05 or smaller, 0.04 or smaller, 0.03 or smaller, 0.02 or smaller, or 0.01 or smaller. In certain embodiments, the human FcγRIIb has the sequence of SEQ ID NO:212, 213, or 214. In certain embodiments, the human FcγRIIIa has the sequence of SEQ ID NO:215, 216, 217, or 218.

[0298] In further embodiments, the variant Fc region has decreased binding activity for human FcγRIIa (type H). In certain embodiments, the ratio of [KD value of a parent Fc region for human FcγRIIa (type H)]/[KD value of a variant Fc region for human FcγRIIa (type H)] can be 5.0 or smaller, 4.0 or smaller, 3.0 or smaller, 2.0 or smaller, 1.0 or smaller, 0.9 or smaller, 0.8 or smaller, 0.7 or smaller, 0.6 or smaller, 0.5 or smaller, 0.4 or smaller, 0.3 or smaller, 0.2 or smaller, or 0.1 or smaller. In further embodiments, the variant Fc region has decreased binding activity for human FcγRIIa (type R). In certain embodiments, the ratio of [KD value of a parent Fc region for human FcγRIIa (type R)]/[KD value of a variant Fc region for human FcγRIIa (type R)] can be 5.0 or smaller, 4.0 or smaller, 3.0 or smaller, 2.0 or smaller, 1.0 or smaller, 0.9 or smaller, 0.8 or smaller, 0.7 or smaller, 0.6 or smaller, 0.5 or smaller, 0.4 or smaller, 0.3 or smaller, 0.2 or smaller, or 0.1 or smaller. In certain embodiments, the human FcγRIIa (type H) has the sequence of SEQ ID NO:211. In certain embodiments, the human FcγRIIa (type R) has the sequence of SEQ ID NO:210.

[0299] In certain embodiments, the ratio of [KD value of a parent Fc region for monkey FcγRIIa]/[KD value of a variant Fc region for monkey FcγRIIa] can be 2.0 or greater, 3.0 or greater, 4.0 or greater, 5.0 or greater, 6.0 or greater, 7.0 or greater, 8.0 or greater, 9.0 or greater, 10 or greater, 15 or greater, 20 or greater, 25 or greater, 30 or greater, 40 or greater, or 50 or greater. In certain embodiments, monkey FcγRIIa is selected from monkey FcγRIIa1 (e.g., cynomolgous FcγRIIa1 (SEQ ID NO:220)), monkey FcγRIIa2 (e.g., cynomolgous FcγRIIa2 (SEQ ID NO:221)), and monkey FcγRIIa3 (e.g., cynomolgous FcγRIIa3 (SEQ ID NO:222).

[0300] In another embodiment, the KD value of the variant Fc region for monkey FcγRIIb can be 1.0×10⁻⁶ M or smaller, 9.0×10⁻⁷ M or smaller, 8.0×10⁻⁷ M or smaller, 7.0×10⁻⁷ M or smaller, 6.0×10⁻⁷ M or smaller, 5.0×10⁻⁷ M or smaller, 4.0×10⁻⁷ M or smaller, 3.0×10⁻⁷ M or smaller, 2.0×10⁻⁷ M or smaller, or 1.0×10⁻⁷ M or smaller. In another embodiment, the KD value of the variant Fc region for monkey FcγRIIIa can be 5.0×10⁻⁷ M or greater, 6.0×10⁻⁷ M or greater, 7.0×10⁻⁷ M or greater, 8.0×10⁻⁷ M or greater, 9.0×10⁻⁷ M or greater, 1.0×10⁻⁶ M or greater, 2.0×10⁻⁶ M or greater, 3.0×10⁻⁶ M or greater, 4.0×10⁻⁶ M or greater, 5.0×10⁻⁶ M or greater, 6.0×10⁻⁶ M or greater, 7.0×10⁻⁶ M or greater, 8.0×10⁻⁶ M or greater, 9.0×10⁻⁶ M or greater, or 1.0×10⁻⁵ M or greater. In another embodiment, the KD value of the variant Fc region for human FcγRIIb can be 2.0×10⁻⁶ M or smaller, 1.0×10⁻⁶ M or smaller, 9.0×10⁻⁷ M or smaller, 8.0×10⁻⁷ M or smaller, 7.0×10⁻⁷ M or smaller, 6.0×10⁻⁷ M or smaller, 5.0×10⁻⁷ M or smaller, 4.0×10⁻⁷ M or smaller, 3.0×10⁻⁷ M or smaller, 2.0×10⁻⁷ M or smaller, or 1.0×10⁻⁷ M or smaller. In another embodiment, the KD value of the variant Fc region for human FcγRIIIa can be 1.0×10⁻⁶ M or greater, 2.0×10⁻⁶ M or greater, 3.0×10⁻⁶ M or greater, 4.0×10⁻⁶ M or greater, 5.0×10⁻⁶ M or greater, 6.0×10⁻⁶ M or greater, 7.0×10⁻⁶ M or greater, 8.0×10⁻⁶ M or greater, 9.0×10⁻⁶ M or greater, 1.0×10⁻⁵ M or greater, 2.0×10⁻⁵ M or greater, 3.0×10⁻⁵ M or greater, 4.0×10⁻⁵ M or greater, or 5.0×10⁻⁵ M or greater. In another embodiment, the KD value of the variant Fc region for human FcγRIIa (type H) can be 1.0×10⁻⁷ M or greater, 2.0×10⁻⁷ M or greater, 3.0×10⁻⁷ M or greater, 4.0×10⁻⁷ M or greater, 5.0×10⁻⁷ M or greater, 6.0×10⁻⁷ M or greater, 7.0×10⁻⁷ M or greater, 8.0×10⁻⁷ M or greater, 9.0×10⁻⁷ M or greater, 1.0×10⁻⁶ M or greater, 2.0×10⁻⁶ M or greater, 3.0×10⁻⁶ M or greater, 4.0×10⁻⁶ M or greater, or 5.0×10⁻⁶ M or greater. In another embodiment, the KD value of the variant Fc region for human FcγRIIa (type R) can be 2.0×10⁻⁷ M or greater, 3.0×10⁻⁷ M or greater, 4.0×10⁻⁷ M or greater, 5.0×10⁻⁷ M or greater, 6.0×10⁻⁷ M or greater, 7.0×10⁻⁷ M or greater, 8.0×10⁻⁷ M or greater, 9.0×10⁻⁷ M or greater, 1.0×10⁻⁶ M or greater, 2.0×10⁻⁶ M or greater, 3.0×10⁻⁶ M or greater, 4.0×10⁻⁶ M or greater, or 5.0×10⁻⁶ M or greater.

[0301] In another embodiment, the KD value of the variant Fc region for monkey FcγRIIa can be 1.0×10⁻⁶ M or smaller, 9.0×10⁻⁷ M or smaller, 8.0×10⁻⁷ M or smaller, 7.0×10⁻⁷ M or smaller, 6.0×10⁻⁷ M or smaller, 5.0×10⁻⁷ M or smaller, 4.0×10⁻⁷ M or smaller, 3.0×10⁻⁷ M or smaller, 2.0×10⁻⁷ M or smaller, or 1.0×10⁻⁷ M or smaller. In certain embodiments, monkey FcγRIIa can be selected from any one of monkey FcγRIIa1, monkey FcγRIIa2, and monkey FcγRIIa3.

[0302] When we develop a pharmaceutical product for the treatment of human diseases, evaluation of its efficacy and safety in monkey are important because of its biological proximity to human. From such viewpoints, a pharmaceutical product to be developed is preferable to have cross-reactivity to both human and monkey in the target binding activity.

[0303] “Fcγ receptors” (herein, referred to as Fey receptors, FcγR or FcgR) refers to receptors that may bind to the Fc region of IgG1, IgG2, IgG3, and IgG4 monoclonal antibodies, and practically means any member of the family of proteins encoded by the Fcγ receptor genes. In humans, this family includes FcγRI (CD64) including isoforms FcγRIa, FcγRIb, and FcγRIc; FcγRII (CD32) including isoforms FcγRIIa (including allotypes H131 (type H) and R131 (type R)), FcγRIIb (including FcγRIIb-1 and FcγRIIb-2), and FcγRIIc; and FcγRIII (CD16) including isoforms FcγRIIIa (including allotypes V158 and F158), and FcγRIIIb (including allotypes FcγRIIIb-NA1 and FcγRIIIb-NA2), and any human FcγRs, FcγR isoforms or allotypes yet to be discovered, but is not limited thereto. FcγRIIb and FcγRIIb2 have been reported as splicing variants of human FcγRIIb. In addition, a splicing variant named FcγRIIb3 has been reported (J Exp Med, 1989, 170: 1369-1385). In addition to these splicing variants, human FcγRIIb includes all splicing variants registered in NCBI, which are NP_001002273.1, NP_001002274.1, NP_001002275.1, NP_001177757.1, and NP_003992.3. Furthermore, human FcγRIIb includes every previously-reported genetic polymorphism, as well as FcγRIIb (Arthritis Rheum. 48:3242-3252 (2003); Kono et al., Hum. Mol. Genet. 14:2881-2892 (2005); and Kyogoju et al., Arthritis Rheum. 46:1242-1254 (2002)), and every genetic polymorphism that will be reported in the future.

[0304] In FcγRIIa, there are two allotypes, one where the amino acid at position 131 of FcγRIIa is histidine (type H) and the other where the amino acid at position 131 is substituted with arginine (type R) (Warrmerdam, J. Exp. Med. 172:19-25 (1990)).

[0305] The FcγR includes human, mouse, rat, rabbit, and monkey-derived FcγRs but is not limited thereto, and may be derived from any organism. Mouse FcγRs include FcγRI (CD64), FcγRII (CD32), FcγRIII (CD16), and FcγRIII-2 (CD16-2), and any mouse FcγRs, or FcγR isoforms, but are not limited thereto. Unless otherwise specified, the term “monkey FcγR” or variation thereof, refers to cynomolgous FcγRIIa1 (SEQ ID NO:220), FcγRIIa2 (SEQ ID NO:221), FcγRIIa3 (SEQ ID NO:222), FcγRIIb (SEQ ID NO:223), or FcγRIIIaS (SEQ ID NO:224).

[0306] The polynucleotide sequence of human FcγRI is set forth in SEQ ID NO: 199 (NM_000566.3); the polynucleotide sequence of human FcγRIIa is set forth in SEQ ID NO: 200 (BC020823.1) or SEQ ID NO:201 (NM_001136219.1); the polynucleotide sequence of human FcγRIIb is set forth in SEQ ID NO: 202 (BC146678.1) or SEQ ID NO:203 (NM_004001.3); the polynucleotide sequence of human FcγRIIIa is set forth in SEQ ID NO: 204 (BC033678.1) or SEQ ID NO:205 (NM_001127593.1); and the polynucleotide sequence of human FcγRIIIb is set forth in SEQ ID NO: 206 (BC128562.1).

[0307] The amino acid sequence of human FcγRI is set forth in SEQ ID NO: 207 (NP_000557.1); the amino acid sequence of human FcγRIIa is set forth in SEQ ID NO: 208 (AAH20823.1), SEQ ID NO:209, SEQ ID NO:210 or SEQ ID NO:211; the amino acid sequence of human FcγRIIb is set forth in SEQ ID NO: 212 (AAI46679.1), SEQ ID NO: 213 or SEQ ID NO:214; the amino acid sequence of human FcγRIIIa is set forth in SEQ ID NO: 215 (AAH33678.1), SEQ ID NO:216, SEQ ID NO:217 or SEQ ID NO:218; and the amino acid sequence of human FcγRIIIb is set forth in SEQ ID NO: 219 (AAI28563.1).

[0308] The amino acid sequence of cynomolgus monkey FcγRIIa is set forth in SEQ ID NO: 220 (FcγRIIa1), SEQ ID NO:221 (FcγRIIa2) or SEQ ID NO:222 (FcγRIIa3); the amino acid sequence of cynomolgus FcγRIIb is set forth in SEQ ID NO: 223; and the amino acid sequence of cynomolgus monkey FcγRIIIa is set forth in SEQ ID NO: 224.

[0309] In one aspect, the invention provides polypeptides containing variant Fc regions with enhanced FcγRIIb-binding activity compared to a corresponding reference FcγRIb-binding polypeptide. In further aspects, the polypeptide of the invention comprises at least one amino acid alteration of at least one position selected from the group consisting of: 231, 232, 233, 234, 235, 236, 237, 238, 239, 264, 266, 267, 268, 271, 295, 298, 325, 326, 327, 328, 330, 331, 332, 334, and 396, according to EU numbering. In certain embodiments, the FcγRIIb has the sequence of cynomolgous monkey FcγRIIb (SEQ ID NO:223). In certain embodiments, the FcγRIIb has the sequence of human FcγRIIb (e.g., SEQ ID NOs:212, 213, or 214).

[0310] In one aspect, the invention provides polypeptides comprising variant Fc regions with enhanced FcγRIIb-binding activity comprising at least two amino acid alterations comprising: (a) one amino acid alteration at position 236, and (b) at least one amino acid alteration of at least one position selected from the group consisting of: 231, 232, 233, 234, 235, 237, 238, 239, 264, 266, 267, 268, 271, 295, 298, 325, 326, 327, 328, 330, 331, 332, 334, and 396, according to EU numbering. In certain embodiments, the FcγRIIb has the sequence of cynomolgous monkey FcγRIIb (SEQ ID NO:223). In certain embodiments, the FcγRIIb has the sequence of human FcγRIIb (e.g., SEQ ID NOs:212, 213, or 214).

[0311] In one aspect, the invention provides polypeptides comprising a variant Fc region with enhanced FcγRIIb-binding activity comprising an amino acid alteration at position 236 according to EU numbering.

[0312] In one aspect, the invention provides polypeptides comprising a variant Fc region with enhanced FcγRIIb-binding activity comprising at least two amino acid alterations comprising: (a) one amino acid alteration at position 236, and (b) at least one amino acid alteration of at least one position selected from the group consisting of: 231, 232, 235, 239, 268, 295, 298, 326, 330, and 396, according to EU numbering. In a further embodiment, the variant Fc region comprises an amino acid alteration of at least one position selected from the group consisting of: 231, 232, 235, 239, 268, 295, 298, 326, 330, and 396, according to EU numbering. In a further embodiment, the variant Fc region comprises an amino acid alteration of at least one position selected from the group consisting of: 268, 295, 326, and 330, according to EU numbering. In certain embodiments, the FcγRIIb has the sequence of cynomolgous monkey FcγRIIb (SEQ ID NO:223). In certain embodiments, the FcγRIIb has the sequence of human FcγRIIb (e.g., SEQ ID NOs:212, 213, or 214).

[0313] In another aspect, the invention provides polypeptides comprising variant Fe regions with enhanced FcγRIIb-binding activity comprising amino acid alterations of any one of the following (1)-(37): (1) positions 231, 236, 239, 268 and 330; (2) positions 231, 236, 239, 268, 295 and 330; (3) positions 231, 236, 268 and 330; (4) positions 231, 236, 268, 295 and 330; (5) positions 232, 236, 239, 268, 295 and 330; (6) positions 232, 236, 268, 295 and 330; (7) positions 232, 236, 268 and 330; (8) positions 235, 236, 268, 295, 326 and 330; (9) positions 235, 236, 268, 295 and 330; (10) positions 235, 236, 268 and 330; (11) positions 235, 236, 268, 330 and 396; (12) positions 235, 236, 268 and 396; (13) positions 236, 239, 268, 295, 298 and 330; (14) positions 236, 239, 268, 295, 326 and 330; (15) positions 236, 239, 268, 295 and 330; (16) positions 236, 239, 268, 298 and 330; (17) positions 236, 239, 268, 326 and 330; (18) positions 236, 239, 268 and 330; (19) positions 236, 239, 268, 330 and 396; (20) positions 236, 239, 268 and 396; (21) positions 236 and 268; (22) positions 236, 268 and 295; (23) positions 236, 268, 295, 298 and 330; (24) positions 236, 268, 295, 326 and 330; (25) positions 236, 268, 295, 326, 330 and 396; (26) positions 236, 268, 295 and 330; (27) positions 236, 268, 295, 330 and 396; (28) positions 236, 268, 298 and 330; (29) positions 236, 268, 298 and 396; (30) positions 236, 268, 326 and 330; (31) positions 236, 268, 326, 330 and 396; (32) positions 236, 268 and 330; (33) positions 236, 268, 330 and 396; (34) positions 236, 268 and 396; (35) positions 236 and 295; (36) positions 236, 330 and 396; and (37) positions 236 and 396, according to EU numbering. In certain embodiments, the FcγRIIb has the sequence of cynomolgous monkey FcγRIIb (SEQ ID NO:223). In certain embodiments, the FcγRIIb has the sequence of human FcγRIIb (e.g., SEQ ID NOs:212, 213, or 214).

[0314] In a further embodiment, the variant Fc region with enhanced FcγRIIb-binding activity comprises at least one amino acid selected from the group consisting of: (a) Asp, Glu, Phe, Gly, His, Ile, Lys, Leu, Met, Asn, Pro, Gln, Arg, Ser, Thr, Val, Trp, Tyr at position 231; (b) Ala, Asp, Glu, Phe, Gly, His, lie, Lys, Leu, Met, Asn, Gln, Arg, Ser, Thr, Val, Trp, Tyr at position 232; (c) Asp at position 233; (d) Trp, Tyr at position 234; (e) Trp at position 235; (f) Ala, Asp, Glu, His, lie, Leu, Met, Asn, Gln, Ser, Thr, Val at position 236; (g) Asp, Tyr at position 237; (h) Glu, Ile, Met, Gln, Tyr at position 238; (i) Ile, Leu, Asn, Pro, Val at position 239; (j) Ile at position 264; (k) Phe at position 266; (l) Ala, His, Leu at position 267; (m) Asp, Glu at position 268; (n) Asp, Glu, Gly at position 271; (o) Leu at position 295; (p) Leu at position 298; (q) Glu, Phe, Ile, Leu at position 325; (r) Thr at position 326; (s) Ile, Asn at position 327; (t) Thr at position 328; (u) Lys, Arg at position 330; (v) Glu at position 331; (w) Asp at position 332; (x) Asp, Ile, Met, Val, Tyr at position 334; and (y) Ala, Asp, Glu, Phe, Gly, His, lie, Lys, Leu, Met, Asn, Gln, Arg, Ser, Thr, Val, Trp, Tyr at position 396; according to EU numbering. In certain embodiments, the FcγRIIb has the sequence of cynomolgous monkey FcγRIIb (SEQ ID NO:223). In certain embodiments, the FcγRIIb has the sequence of human FcγRIIb (e.g., SEQ ID NOs:212, 213, or 214).

[0315] In a further embodiment, the variant Fc region with enhanced FcγRIIb-binding activity comprises at least one amino acid alteration (e.g., substitution) selected from the group consisting of: (a) Gly, Thr at position 231; (b) Asp at position 232; (c) Trp at position 235; (d) Asn, Thr at position 236; (e) Val at position 239; (f) Asp, Glu at position 268; (g) Leu at position 295; (h) Leu at position 298; (i) Thr at position 326; (j) Lys, Arg at position 330; and (k) Lys, Met at position 396; according to EU numbering. In a further embodiment, the variant Fc region with enhanced FcγRIIb-binding activity comprises amino acid alterations (e.g., substitutions) of: Asn at position 236, Glu at position 268, Lys at position 330, and Met at position 396; according to EU numbering. In a further embodiment, the variant Fc region with enhanced FcγRIIb-binding activity comprises amino acid alterations (e.g., substitutions) of: Asn at position 236, Asp at position 268, and Lys at position 330; according to EU numbering. In a further embodiment, the variant Fc region with enhanced FcγRIIb-binding activity comprises amino acid alterations (e.g., substitutions) of: Asn at position 236, Asp at position 268, Leu at position 295, and Lys at position 330; according to EU numbering. In a further embodiment, the variant Fc region with enhanced FcγRIIb-binding activity comprises amino acid alterations (e.g., substitutions) of: Thr at position 236, Asp at position 268, and Lys at position 330; according to EU numbering. In a further embodiment, the variant Fc region with enhanced FcγRIIb-binding activity comprises amino acid alterations (e.g., substitutions) of Asn at position 236, Asp at position 268, Leu at position 295, Thr at position 326, and Lys at position 330; according to EU numbering. In a further embodiment, the variant Fc region with enhanced FcγRIIb-binding activity comprises amino acid alterations (e.g., substitutions) of: Trp at position 235, Asn at position 236, Asp at position 268, Leu at position 295, Thr at position 326, and Lys at position 330; according to EU numbering.

[0316] In one aspect, the invention provides polypeptides comprising variant Fc regions with enhanced FcγRIIb-binding activity comprising an amino acid alteration at position 238 according to EU numbering.

[0317] In one aspect, the invention provides polypeptides comprising variant Fc regions with enhanced FcγRIIb-binding activity comprising at least one amino acid alteration of at least one position selected from the group consisting of: 234, 238, 250, 264, 267, 307, and 330 according to EU numbering. In further embodiments, the polypeptide comprises at least one amino acid alteration of at least one position selected from the group consisting of: 234, 250, 264, 267, 307, and 330 according to EU numbering. In certain embodiments, the FcγRIIb has the sequence of cynomolgous monkey FcγRIIb (SEQ ID NO:223). In certain embodiments, the FcγRIIb has the sequence of human FcγRIIb (e.g., SEQ ID NOs:212, 213, or 214).

[0318] In another aspect, the invention provides polypeptides comprising variant Fc regions with enhanced FcγRIIb-binding activity comprising amino acid alterations of any one of the following (1)-(9): (1) positions 234, 238, 250, 307 and 330; (2) positions 234, 238, 250, 264, 307 and 330; (3) positions 234, 238, 250, 264, 267, 307 and 330; (4) positions 234, 238, 250, 267, 307 and 330; (5) positions 238, 250, 264, 307 and 330; (6) positions 238, 250, 264, 267, 307 and 330; (7) positions 238, 250, 267, 307 and 330; (8) positions 238, 250 and 307; and (9) positions 238, 250, 307 and 330, according to EU numbering. In certain embodiments, the FcγRIIb has the sequence of cynomolgous monkey FcγRIIb (SEQ ID NO:223). In certain embodiments, the FcγRIIb has the sequence of human FcγRIIb (e.g., SEQ ID NOs:212, 213, or 214).

[0319] In a further embodiment, the variant Fc region with enhanced FcγRIIb-binding activity comprises at least one amino acid alteration (e.g., substitution) selected from the group consisting of: (a) Tyr at position 234; (b) Asp at position 238; (c) Val at position 250, (d) Ile at position 264; (e) Ala at position 267; (f) Pro at position 307; and (g) Lys at position 330; according to EU numbering. In a further embodiment, the variant Fc region with enhanced FcγRIIb-binding activity comprises amino acid alterations (e.g., substitutions) of: Asp at position 238; according to EU numbering. In a further embodiment, the variant Fc region with enhanced FcγRIIb-binding activity comprises amino acid alterations (e.g., substitutions) of: Asp at position 238, Val at position 250, and Pro at position 307; according to EU numbering. In a further embodiment, the variant Fc region with enhanced FcγRIIb-binding activity comprises amino acid alterations (e.g., substitutions) of: Asp at position 238, Val at position 250, Pro at position 307, and Lys at position 330; according to EU numbering. In a further embodiment, the variant Fc region with enhanced FcγRIIb-binding activity comprises amino acid alterations (e.g., substitutions) of: Asp at position 238, Val at position 250, Ile at position 264, Pro at position 307, and Lys at position 330; according to EU numbering. In a further embodiment, the variant Fc region with enhanced FcγRIIb-binding activity comprises amino acid alterations (e.g., substitutions) of: Asp at position 238, Val at position 250, Ala at position 267, Pro at position 307, and Lys at position 330; according to EU numbering. In a further embodiment, the variant Fc region with enhanced FcγRIIb-binding activity comprises amino acid alterations (e.g., substitutions) of: Tyr at position 234, Asp at position 238, Val at position 250, Pro at position 307, and Lys at position 330; according to EU numbering. In a further embodiment, the variant Fc region with enhanced FcγRIIb-binding activity comprises amino acid alterations (e.g., substitutions) of: Tyr at position 234, Asp at position 238, Val at position 250, Ala at position 267, Pro at position 307, and Lys at position 330; according to EU numbering. In a further embodiment, the variant Fc region with enhanced FcγRIIb-binding activity comprises amino acid alterations (e.g., substitutions) of: Asp at position 238, Val at position 250, Ile at position 264, Ala at position 267, Pro at position 307, and Lys at position 330; according to EU numbering. In a further embodiment, the variant Fc region with enhanced FcγRIIb-binding activity comprises amino acid alterations (e.g., substitutions) of: Tyr at position 234, Asp at position 238, Val at position 250, Ile at position 264, Pro at position 307, and Lys at position 330; according to EU numbering. In a further embodiment, the variant Fc region with enhanced FcγRIIb-binding activity comprises amino acid alterations (e.g., substitutions) of: Tyr at position 234, Asp at position 238, Val at position 250, lie at position 264, Ala at position 267, Pro at position 307, and Lys at position 330; according to EU numbering. In certain embodiments, the FcγRIIb has the sequence of cynomolgous monkey FcγRIIb (SEQ ID NO:223). In certain embodiments, the FcγRIIb has the sequence of human FcγRIIb (e.g., SEQ ID NOs:212, 213, or 214).

[0320] In another aspect, the invention provides isolated polypeptides comprising variant Fc regions with increased isoelectric point (pI). In certain embodiments, a variant Fc region described herein comprises at least two amino acid alterations in a parent Fc region. In certain embodiments, each of the amino acid alterations increases the isoelectric point (pI) of the variant Fc region compared with that of the parent Fc region. They are based on the findings that antigen elimination from plasma can be promoted with an antibody whose pI has been increased by modification of at least two amino acid residues, for example when the antibody is administered in vivo.

[0321] In the present invention, pI may be either a theoretical or an experimentally determined pI. The value of pI can be determined, for example, by isoelectric focusing known to those skilled in the art. The value of a theoretical pI can be calculated, for example, using gene and amino acid sequence analysis software (Genetyx, etc.).

[0322] In one embodiment, the pI value may be increased, for example, at least by 0.01, 0.03, 0.05, 0.1, 0.2, 0.3, 0.4, 0.5, or more, at least by 0.6, 0.7, 0.8, 0.9, or more, at least by 1.0, 1.1, 1.2, 1.3, 1.4, 1.5, or more, or at least by 1.6, 1.7, 1.8, 1.9, 2.0, 2.1, 2.2, 2.3, 2.4, 2.5, 3.0 or more, as compared to before modification.

[0323] In certain embodiments, the amino acid for increased pI can be exposed on the surface of the variant Fc region. In the present invention, an amino acid that can be exposed on the surface generally refers to an amino acid residue located on the surface of a polypeptide constituting a variant Fc region. An amino acid residue located on the surface of a polypeptide refers to an amino acid residue whose side chain can be in contact with solvent molecules (which in general are mostly water molecules). However, the side chain does not necessarily have to be wholly in contact with solvent molecules, and when even a portion of the side chain is in contact with the solvent molecules, the amino acid is defined as an “amino acid residue located on the surface”. The amino acid residues located on the surface of a polypeptide also include amino acid residues located close to the surface and thereby can have an electric charge influence from another amino acid residue whose side chain, even partly, is in contact with the solvent molecules. Those skilled in the art can prepare a homology model of a polypeptide for example, using commercially available softwares. Alternatively, it is possible to use methods known to those skilled in the art, such as X-ray crystallography. The amino acid residues that can be exposed on the surface are determined, for example, using coordinates from a three-dimensional model using a computer program such as InsightII program (Accelrys). Surface-exposable sites may be determined using algorithms known in the technical field (for example, Lee and Richards (J. Mol. Biol. 55:379-400 (1971)); Connolly (J. Appl. Cryst. 16:548-558 (1983)). Surface-exposable sites can be determined using software suitable for protein modeling and three-dimensional structure information. Software available for such purposes includes, for example, the SYBYL Biopolymer Module software (Tripos Associates). When an algorithm requires a user input size parameter, the “size” of a probe which is used in the calculation may be set to about 1.4 Angstrom (A) or less in radius. Furthermore, methods for determining surface-exposable regions using software for personal computers have been described by Pacios (Comput. Chem. 18(4):377-386 (1994); J. Mol. Model. 1:46-53 (1995)). Based on such information as described above, appropriate amino acid residues located on the surface of a polypeptide that constitutes a variant Fc region can be selected.

[0324] In certain embodiments, a polypeptide comprises both the variant Fc region and an antigen-binding domain. In further embodiments, the antigen is a soluble antigen. In one embodiment, the antigen is present in biological fluids (for example, plasma, interstitial fluid, lymphatic fluid, ascitic fluid, and pleural fluid) of subjects. The antigen may also be a membrane antigen.

[0325] In further embodiments, antigen-binding activity of the antigen-binding domain changes according to ion concentration conditions. In one embodiment, ion concentration is not particularly limited and refers to hydrogen ion concentration (pH) or metal ion concentration. Herein, metal ions refer to ions of group I elements except hydrogen, such as alkaline metals and the copper group elements, group II elements such as alkaline earth metals and zinc group elements, group III elements except boron, group 1V elements except carbon and silicon, group VIII elements such as iron group and platinum group elements, elements belonging to subgroup A of groups V, VI, and VII, and metal elements such as antimony, bismuth, and polonium. In the present invention, metal ions include, for example, calcium ion, as described in WO 2012/073992 and WO 2013/125667. In one embodiment, “ion concentration condition” may be a condition that focuses on differences in the biological behavior of an antigen-binding domain between a low ion concentration and a high ion concentration. Furthermore, “antigen-binding activity of an antigen-binding domain changes according to ion concentration conditions” means that the antigen-binding activity of an antigen-binding domain changes between a low ion concentration and a high ion concentration (such an antigen-binding domain is referred to herein as “ion concentration-dependent antigen-binding domain”). The antigen-binding activity of an antigen-binding domain under a high ion concentration condition may be higher (stronger) or lower (weaker) than that under a low ion concentration condition. In one embodiment, ion concentration-dependent antigen-binding domains (such as pH-dependent antigen-binding domains or calcium ion concentration-dependent antigen-binding domains) can be obtained by known methods, for example, described in WO 2009/125825, WO 2012/073992, and WO 2013/046722.

[0326] In the present invention, the antigen-binding activity of an antigen-binding domain under a high calcium ion concentration condition may be higher than under a low calcium ion concentration condition. The high calcium ion concentration is not particularly limited to but may be a concentration selected between 100 μM and 10 mM, between 200 μM and 5 mM, between 400 μM and 3 mM, between 200 μM and 2 mM, between 400 μM and 1 mM, or between 500 μM and 2.5 mM, which is preferable to be close to the plasma (blood) concentration of calcium ion in vivo. Meanwhile, the low calcium ion concentration is not particularly limited to but may be a concentration selected between 0.1 μM and 30 μM, between 0.2 μM and 20 μM, between 0.5 μM and 10 μM, between 1 μM and 5 μM, or between 2 μM and 4 μM, which is preferable to be close to the concentration of calcium ion in early endosomes in vivo.

[0327] In one embodiment, the ratio between the antigen-binding activities under a low calcium ion concentration condition and a high calcium ion concentration condition is not limited but the ratio of the dissociation constant (KD) under a low calcium ion concentration condition to the KD under a high calcium ion concentration condition, i.e., KD (low calcium ion concentration condition)/KD (high calcium ion concentration condition), is 2 or more, 10 or more, or 40 or more. The upper limit of the ratio may be 400, 1000, or 10000, as long as such an antigen-binding domain can be produced by techniques known to those skilled in the art. Alternatively, for example, the dissociation rate constant (kd) can be used instead of the KD. In this case, the ratio of the kd under a low calcium ion concentration condition to the kd under a high calcium ion concentration condition, i.e., kd (low calcium ion concentration condition)/kd (high calcium ion concentration condition), is 2 or more, 5 or more, 10 or more, or 30 or more. The upper limit of the ratio may be 50, 100, or 200, as long as the antigen-binding domain can be produced based on the common technical knowledge of those skilled in the art.

[0328] In the present invention, the antigen-binding activity of an antigen-binding domain under a low hydrogen ion concentration (neutral pH) may be higher than under a high hydrogen ion concentration (acidic pH). The acidic pH may be, for example, a pH selected from pH4.0 to pH6.5, selected from pH4.5 to pH6.5, selected from pH5.0 to pH6.5, or selected from pH5.5 to pH6.5, which is preferable to be close to the in vivo pH in early endosomes. The acidic pH may also be, for example, pH5.8 or pH6.0. In particular embodiments, the acidic pH is pH5.8. Meanwhile, the neutral pH may be, for example, a pH selected from pH6.7 to pH10.0, selected from pH6.7 to pH9.5, selected from pH7.0 to pH9.0, or selected from pH7.0 to pH8.0, which is preferable to be close to the in vivo pH in plasma (blood). The neutral pH may also be, for example, pH7.4 or pH7.0. In particular embodiments, the neutral pH is pH7.4.

[0329] In one embodiment, the ratio between the antigen-binding activities under an acidic pH condition and a neutral pH condition is not limited but the ratio of the dissociation constant (KD) under an acidic pH condition to the KD under a neutral pH condition, i.e., KD (acidic pH condition)/KD (neutral pH condition), is 2 or more, 10 or more, or 40 or more. The upper limit of the ratio may be 400, 1000, or 10000, as long as such an antigen-binding domain can be produced by techniques known to those skilled in the art. Alternatively, for example, the dissociation rate constant (kd) can be used instead of the KD. In this case, the ratio of the kd under an acidic pH condition to the kd under a neutral pH condition, i.e., kd (acidic pH condition)/kd (neutral pH condition) is 2 or more, 5 or more, 10 or more, or 30 or more. The upper limit of the ratio may be 50, 100, or 200, as long as the antigen-binding domain can be produced based on the common technical knowledge of those skilled in the art.

[0330] In one embodiment, for example, at least one amino acid residue is substituted with an amino acid residue with a side-chain pKa of 4.0-8.0, and/or at least one amino acid with a side-chain pKa of 4.0-8.0 is inserted in the antigen-binding domain, as described in WO 2009/125825. The amino acid may be substituted and/or inserted at any site as long as the antigen-binding activity of the antigen-binding domain becomes weaker under an acidic pH condition than under a neutral pH condition as compared to before the substitution or insertion. When the antigen-binding domain has a variable region or CDR, the site may be within the variable region or CDR. The number of amino acids that are substituted or inserted can be appropriately determined by those skilled in the art; and the number may be one or more. Amino acids with a side-chain pKa of 4.0-8.0 can be used to change the antigen-binding activity of the antigen-binding domain according to the hydrogen ion concentration condition. Such amino acids include, for example, natural amino acids such as His (H) and Glu (E), and unnatural amino acids such as histidine analogs (US2009/0035836), m-N02-Tyr (pKa 7.45), 3,5-Br2-Tyr (pKa 7.21), and 3,5-I2-Tyr (pKa 7.38) (Heyl et al., Bioorg. Med. Chem. 11(17):3761-3768 (2003)). Amino acids with a side-chain pKa of 6.0-7.0 can also be used, which include, e.g., His (H).

[0331] In another embodiment, preferable antigen-binding domains for the variant Fc region with increased pI are described and can be obtained by methods described in Japanese patent applications JP2015-021371 and JP2015-185254.

[0332] In certain embodiments, the variant Fc region with increased pI comprises at least two amino acid alterations of at least two positions selected from the group consisting of: 285, 311, 312, 315, 318, 333, 335, 337, 341, 342, 343, 384, 385, 388, 390, 399, 400, 401, 402, 413, 420, 422, and 431, according to EU numbering.

[0333] In further embodiments, the variant Fc region with increased pI comprises at least two amino acid alterations of at least two positions selected from the group consisting of: 311, 341, 343, 384, 399, 400, 401, 402, and 413, according to EU numbering.

[0334] In another aspect, the invention provides polypeptides comprising variant Fc regions with increased pI comprising amino acid alterations of any one of the following (1)-(10): (1) positions 311 and 341; (2) positions 311 and 343; (3) positions 311, 343 and 413; (4) positions 311, 384 and 413; (5) positions 311 and 399; (6) positions 311 and 401; (7) positions 311 and 413; (8) positions 400 and 413; (9) positions 401 and 413; and (10) positions 402 and 413; according to EU numbering.

[0335] A method for increasing the pI of a protein is, for example, to reduce the number of amino acids with a negatively charged side chain (for example, aspartic acid and glutamic acid) and/or to increase the number of amino acids with a positively charged side chain (for example, arginine, lysine and histidine) at a neutral pH condition. Amino acids with a negatively charged side chain have a negative charge represented as −1 at a pH condition that is sufficiently higher than their side chain pKa, which is a theory well known to those skilled in the art. For example, the theoretical pKa for the side chain of aspartic acid is 3.9, and the side chain has a negative charge represented as −1 at a neutral pH condition (for example, in a solution of pH7.0). Conversely, amino acids with a positively charged side chain have a positive charge represented as +1 at a pH condition that is sufficiently lower than their side chain pKa. For example, the theoretical pKa for the side chain of arginine is 12.5, and the side chain has a positive charge represented as +1 at a neutral pH condition (for example, in a solution of pH7.0). Meanwhile, amino acids whose side chain has no charge at a neutral pH condition (for example, in a solution of pH7.0) are known to include 15 types of natural amino acids, i.e., alanine, cysteine, phenylalanine, glycine, isoleucine, leucine, methionine, asparagine, proline, glutamine, serine, threonine, valine, tryptophan, and tyrosine. As a matter of course, it is understood that amino acids for increasing the pI may be unnatural amino acids.

[0336] From the above, a method for increasing the pI of a protein at a neutral pH condition (for example, in a solution of pH7.0) can confer a charge alteration of +1 to a protein of interest, for example, by substituting amino acids with non-charged side chains for aspartic acid or glutamic acid (whose side chain has a negative charge of −1) in the amino acid sequence of the protein. Furthermore, a charge alteration of +1 can be conferred to the protein, for example, by substituting arginine or lysine (whose side chain has a positive charge of +1) for amino acids whose side chain has no charge. Moreover, a charge alteration of +2 can be conferred at a time to the protein by substituting arginine or lysine (whose side chain has a positive charge of +1) for aspartic acid or glutamic acid (whose side chain has a negative charge of −1). Alternatively, to increase the pI of a protein, amino acids with a side chain having no charge and/or preferably amino acids having a positively charged side chain can be added or inserted into the amino acid sequence of the protein, or amino acids with a side chain having no charge and/or preferably amino acids with a negatively charged side chain present in the amino acid sequence of the protein can be deleted. It is understood that, for example, the N-terminal and C-terminal amino acid residues of a protein have a main chain-derived charge (NH₃⁺ of the amino group at the N-terminus and COO⁻ of the carbonyl group at the C-terminus) in addition to their side chain-derived charges. Thus, the pI of a protein can also be increased by performing to the main chain-derived functional groups some addition, deletion, substitution, or insertion.

[0337] The substitution of an amino acid to increase the pI includes, for example, substitution of an amino acid whose side chain has no charge for an amino acid having a negatively charged side chain, substitution of an amino acid having a positively charged side chain for an amino acid whose side chain has no charge, and substitution of an amino acid having a positively charged side chain for an amino acid having a negatively charged side chain in the amino acid sequence of a parent Fc region, which are performed alone or in appropriate combinations.

[0338] The insertion or addition of an amino acid to increase the pI includes, for example, insertion or addition of an amino acid whose side chain has no charge, and/or insertion or addition of an amino acid having a positively charged side chain in the amino acid sequence of a parent Fc region, which are performed alone or in appropriate combinations.

[0339] The deletion of an amino acid to increase the pI includes, for example, deletion of an amino acid whose side chain has no charge, and/or deletion of an amino acid having a negatively charged side chain in the amino acid sequence of a parent Fc region, which are performed alone or in appropriate combinations.

[0340] In one embodiment, natural amino acids used for increasing pI can be classified as follows: (a) an amino acid with a negatively charged side chain can be Glu (E) or Asp (D); (b) an amino acid whose side chain has no charge can be Ala (A), Asn (N), Cys (C), Gin (Q), Gly (G), His (H), Ile (I), Leu (L), Met (M), Phe (F), Pro (P), Ser (S), Thr (T), Trp (W), Tyr (Y), or Val (V); and (c) an amino acid with a positively charged side chain can be His (H), Lys (K), or Arg (R). In one embodiment, the amino acid insertion or substitution after modification is Lys (K) or Arg (R).

[0341] In another aspect, the invention provides isolated polypeptides comprising variant Fc regions with enhanced FcγRIIb-binding activity and increased pI. In certain embodiments, a variant Fc region described herein comprises at least two amino acid alterations in a parent Fc region.

[0342] In one aspect, the invention provides polypeptides comprising variant Fc regions with enhanced FcγRIIb-binding activity and increased pI comprising at least three amino acid alterations comprising: (a) at least one amino acid alteration of at least one position selected from the group consisting of: 231, 232, 233, 234, 235, 236, 237, 238, 239, 264, 266, 267, 268, 271, 295, 298, 325, 326, 327, 328, 330, 331, 332, 334, and 396, according to EU numbering, and (b) at least two amino acid alterations of at least two positions selected from the group consisting of: 285, 311, 312, 315, 318, 333, 335, 337, 341, 342, 343, 384, 385, 388, 390, 399, 400, 401, 402, 413, 420, 422, and 431, according to EU numbering.

[0343] In one aspect, the invention provides polypeptides comprising variant Fc regions with enhanced FcγRIIb-binding activity and increased pI, and that comprise at least three amino acid alterations comprising: (a) at least one amino acid alteration of at least one position selected from the group consisting of: 231, 232, 235, 236, 239, 268, 295, 298, 326, 330, and 396, according to EU numbering, and (b) at least two amino acid alterations of at least two positions selected from the group consisting of: 311, 341, 343, 384, 399, 400, 401, 402, and 413, according to EU numbering.

[0344] In another aspect, the invention provides polypeptides comprising variant Fc regions with enhanced FcγRIIb-binding activity and increased pI comprising amino acid alterations of any one of the following (1)-(9): (1) positions 235, 236, 268, 295, 311, 326, 330 and 343; (2) positions 236, 268, 295, 311, 326, 330 and 343; (3) positions 236, 268, 295, 311, 330 and 413; (4) positions 236, 268, 311, 330, 396 and 399; (5) positions 236, 268, 311, 330 and 343; (6) positions 236, 268, 311, 330, 343 and 413; (7) positions 236, 268, 311, 330, 384 and 413; (8) positions 236, 268, 311, 330 and 413; and (9) positions 236, 268, 330, 396, 400 and 413; according to EU numbering. In certain embodiments, the FcγRIIb has the sequence of cynomolgous monkey FcγRIIb (SEQ ID NO:223). In certain embodiments, the FcγRIIb has the sequence of human FcγRIIb (e.g., SEQ ID NOs:212, 213, or 214).

[0345] In one aspect, the invention provides polypeptides comprising variant Fc regions with enhanced FcγRIIb-binding activity and increased pI comprising at least three amino acid alterations comprising: (a) at least one amino acid alteration of at least one position selected from the group consisting of: 234, 238, 250, 264, 267, 307, and 330, and (b) at least two amino acid alterations of at least two positions selected from the group consisting of: 285, 311, 312, 315, 318, 333, 335, 337, 341, 342, 343, 384, 385, 388, 390, 399, 400, 401, 402, 413, 420, 422, and 431, according to EU numbering. In further embodiments, the polypeptides comprise at least two amino acid alterations of at least two positions selected from the group consisting of: 311, 341, 343, 384, 399, 400, 401, 402, and 413, according to EU numbering. In certain embodiments, the FcγRIIb has the sequence of cynomolgous monkey FcγRIIb (SEQ ID NO:223). In certain embodiments, the FcγRIIb has the sequence of human FcγRIIb (e.g., SEQ ID NOs:212, 213, or 214).

[0346] In another aspect, the invention provides polypeptides comprising variant Fc regions with enhanced FcγRIIb-binding activity and increased pI comprising amino acid alterations of any one of the following (1)-(16): (1) positions 234, 238, 250, 264, 307, 311, 330 and 343; (2) positions 234, 238, 250, 264, 307, 311, 330 and 413; (3) positions 234, 238, 250, 264, 267, 307, 311, 330 and 343; (4) positions 234, 238, 250, 264, 267, 307, 311, 330 and 413; (5) positions 234, 238, 250, 267, 307, 311, 330 and 343; (6) positions 234, 238, 250, 267, 307, 311, 330 and 413; (7) positions 234, 238, 250, 307, 311, 330 and 343; (8) positions 234, 238, 250, 307, 311, 330 and 413; (9) positions 238, 250, 264, 267, 307, 311, 330 and 343; (10) positions 238, 250, 264, 267, 307, 311, 330 and 413; (11) positions 238, 250, 264, 307, 311, 330 and 343; (12) positions 238, 250, 264, 307, 311, 330 and 413; (13) positions 238, 250, 267, 307, 311, 330 and 343; (14) positions 238, 250, 267, 307, 311, 330 and 413; (15) positions 238, 250, 307, 311, 330 and 343; and (16) positions 238, 250, 307, 311, 330 and 413; according to EU numbering.

[0347] In a further embodiment, the variant Fc region comprises amino acid alterations selected from any single alteration, combination of single alterations, or combination alterations described in Tables 14-30.

[0348] In some embodiments, a polypeptide comprises a variant Fc region of the present invention. In a further embodiment, the polypeptide is an antibody heavy chain constant region. In a further embodiment, the polypeptide is an antibody heavy chain. In a further embodiment, the polypeptide is an antibody. In a further embodiment, the polypeptide is an Fc fusion protein.

[0349] In a further embodiment, the invention provides a polypeptide comprising the amino acid sequence of SEQ ID NO: 229-380, or 381.

[0350] A “parent Fc region” as used herein refers to an Fc region prior to introduction of amino acid alteration(s) described herein. Preferred examples of the parent Fc region include Fc regions derived from native antibodies. Antibodies include, for example, IgA (IgA1, IgA2), IgD, IgE, IgG (IgG1, IgG2, IgG3, IgG4), and IgM, or such. Antibodies may be derived from human or monkey (e.g., cynomolgus, rhesus macaque, marmoset, chimpanzee, or baboon). Native antibodies may also include naturally-occurring mutations. A plurality of allotype sequences of IgGs due to genetic polymorphism are described in “Sequences of proteins of immunological interest”, NIH Publication No. 91-3242, and any of them may be used in the present invention. In particular, for human IgG1, the amino acid sequence at positions 356 to 358 (EU numbering) may be either DEL or EEM. Preferred examples of the parent Fc region include Fc regions derived from a heavy chain constant region of human IgG1 (SEQ ID NO: 195), human IgG2 (SEQ ID NO: 196), human IgG3 (SEQ ID NO: 197), and human IgG4 (SEQ ID NO: 198). Another preferred example of the parent Fc region is an Fc region derived from a heavy chain constant region SG1 (SEQ ID NO: 9). Furthermore, the parent Fc region may be an Fc region produced by adding an amino acid alteration(s) other than the amino acid alteration(s) described herein to an Fc region derived from a native antibody.

[0351] In addition, amino acid alterations performed for other purpose(s) can be combined in a variant Fc region described herein. For example, amino acid substitutions that improve FcRn-binding activity (Hinton et al., J. Immunol. 176(1):346-356 (2006); Dall'Acqua et al., J. Biol. Chem. 281(33):23514-23524 (2006); Petkova et al., Intl. Immunol. 18(12):1759-1769 (2006); Zalevsky et al., Nat. Biotechnol. 28(2): 157-159 (2010); WO 2006/019447; WO 2006/053301; and WO 2009/086320), and amino acid substitutions for improving antibody heterogeneity or stability (WO 2009/041613) may be added. Alternatively, polypeptides with the property of promoting antigen clearance, which are described in WO 2011/122011, WO 2012/132067, WO 2013/046704 or WO 2013/180201, polypeptides with the property of specific binding to a target tissue, which are described in WO 2013/180200, polypeptides with the property for repeated binding to a plurality of antigen molecules, which are described in WO 2009/125825, WO 2012/073992 or WO 2013/047752, can be combined with a variant Fc region described herein. Alternatively, with the objective of conferring binding ability to other antigens, the amino acid alterations disclosed in EP1752471 and EP1772465 may be combined in CH3 of a variant Fc region described herein. Alternatively, with the objective of increasing plasma retention, amino acid alterations that decrease the pI of the constant region (WO 2012/016227) may be combined in a variant Fc region described herein. Alternatively, with the objective of promoting uptake into cells, amino acid alterations that increase the pI of the constant region (WO 2014/145159) may be combined in a variant Fc region described herein. Alternatively, with the objective of promoting elimination of a target molecule from plasma, amino acid alterations that increase the pI of the constant region (Japanese patent application numbers JP2015-021371 and JP2015-185254) may be combined in a variant Fc region described herein. In one embodiment, such alteration may include, for example, substitution at al least one position selected from the group consisting of 311, 343, 384, 399, 400, and 413 according to EU numbering. In a further embodiment, such substitution may be a replacement of an amino acid with Lys or Arg at each position.

[0352] Amino acid alterations of enhancing human FcRn-binding activity under acidic pH can also be combined in a variant Fc region described herein. Specifically, such alterations may include, for example, substitution of Leu for Met at position 428 and substitution of Ser for Asn at position 434, according to EU numbering (Zalevsky et al., Nat. Biotechnol. 28:157-159 (2010)); substitution of Ala for Asn at position 434 (Deng et al., Metab. Dispos. 38(4):600-605 (2010)); substitution of Tyr for Met at position 252, substitution of Thr for Ser at position 254 and substitution of Glu for Thr at position 256 (Dall'Acqua et al., J. Biol. Chem. 281:23514-23524 (2006)); substitution of Gln for Thr at position 250 and substitution of Leu for Met at position 428 (Hinton et al., J. Immunol 176(1):346-356 (2006)); substitution of His for Asn at position 434 (Zheng et al., Clin. Pharmacol. Ther. 89(2):283-290 (2011), and alterations described in WO 2010/106180, WO 2010/045193, WO 2009/058492, WO 2008/022152, WO 2006/050166, WO 2006/053301, WO 2006/031370, WO 2005/123780, WO 2005/047327, WO 2005/037867, WO 2004/035752, or WO 2002/060919. Such alterations may include, for example, at least one alteration selected from the group consisting of substitution of Leu for Met at position 428, substitution of Ala for Asn at position 434 and substitution of Thr for Tyr at position 436. Those alterations may further include substitution of Arg for Gin at position 438 and/or substitution of Glu for Ser at position 440 (Japanese patent application numbers JP2015-021371 and JP2015-185254).

[0353] Two or more polypeptides comprising a variant Fc region described herein can be included in one molecule, wherein two polypeptides comprising variant Fc regions are associated, much like in an antibody. The type of antibody is not limited, and IgA (IgA1, IgA2), IgD, IgE, IgG (IgG1, IgG2, IgG3, IgG4), and IgM, or such can be used.

[0354] The two associated polypeptides comprising variant Fc regions may be polypeptides comprising variant Fc regions into which the same amino acid alteration(s) have been introduced (hereinafter, referred to as homologous variant Fc regions), or polypeptides comprising variant Fc regions into which different amino acid alteration(s) have been introduced, or alternatively polypeptides comprising variant Fc regions where amino acid alteration(s) have been introduced into only one of the Fc regions (hereinafter, referred as a heterologous polypeptides comprising variant Fc regions). One of the preferable amino acid alterations is an alteration in the loop structure from positions 233 to 239 (EU numbering) in the CH2 domain of the Fc region, which is involved in binding with FcγRIIb and FcγRIIa. Preferably, an alteration is introduced in the loop structure of the CH2 domain of one of the Fc regions that enhances FcγRIIb-binding activity and/or selectivity, and another alteration is introduced in the loop structure of the CH2 domain of the other Fc region that destabilizes it. Examples of amino acid alterations that can destabilize the loop structure of the CH2 domain may be substitution of at least one amino acid selected from amino acids at positions 235, 236, 237, 238, and 239 to another amino acid. Specifically, it can be destabilized, for example, by altering the amino acid at position 235 to Asp, Gln, Glu, or Thr, altering the amino acid at position 236 to Asn, altering the amino acid at position 237 to Phe or Trp, altering the amino acid at position 238 to Glu, Gly, or Asn, and altering the amino acid at position 239 to Asp or Glu, according to EU numbering.

[0355] For association of heterologous polypeptides comprising variant Fc regions, a technique of suppressing unintended association of homologous polypeptides comprising variant Fc regions by introducing electrostatic repulsion into the interface of the CH2 or CH3 domain of the Fc region can be applied, as described in WO 2006/106905.

[0356] Examples of amino acid residues in contact at the interface of the CH2 or CH3 domain of the Fc region include the residue at position 356 (EU numbering), the residue at position 439 (EU numbering), the residue at position 357 (EU numbering), the residue at position 370 (EU numbering), the residue at position 399 (EU numbering), and the residue at position 409 (EU numbering) in the CH3 domain.

[0357] More specifically, for example, the Fc region in which one to three pairs of amino acid residues selected from (1) to (3) shown below have the same charge can be produced: (1) amino acid residues at positions 356 and 439 (EU numbering) in the CH3 domain; (2) amino acid residues at positions 357 and 370 (EU numbering) in the CH3 domain; and (3) amino acid residues at positions 399 and 409 (EU numbering) in the CH3 domain.

[0358] Furthermore, heterologous polypeptides comprising variant Fc regions can be produced, wherein one to three pairs of amino acid residues selected from (1) to (3) indicated above have the same charge in the CH3 domain of the first Fc region, and the pairs of amino acid residues selected in the aforementioned first Fc region also have the same charge in the CH3 domain of the second Fc region, provided that the charges in the first and second Fc regions are opposite.

[0359] In the above-mentioned Fc regions, for example, negatively-charged amino acid residues are preferably selected from glutamic acid (E) and aspartic acid (D), and positively-charged amino acid residues are preferably selected from lysine (K), arginine (R), and histidine (H).

[0360] Other known techniques can be used additionally for association of heterologous polypeptides comprising variant Fc regions. Specifically, such a technique is conducted by substituting an amino acid side chain present in one of the Fc regions with a larger side chain (knob; which means “bulge”), and substituting an amino acid side chain present in the Fc region with a smaller side chain (hole; which means “void”), to place the knob within the hole. This can promote efficient association between Fc-region-containing polypeptides having different amino acid sequences from each other (WO 1996/027011; Ridgway et al., Prot. Eng. 9:617-621 (1996); Merchant et al., Nat. Biotech. 16, 677-681 (1998)).

[0361] In addition, other known techniques can also be used for heterologous association of polypeptides comprising variant Fc regions. Association of polypeptides comprising an Fc region can be induced efficiently using strand-exchange engineered domain CH3 heterodimers (Davis et al., Prof. Eng. Des. & Sel., 23:195-202 (2010)). This technique can also be used to efficiently induce association between Fc region-containing polypeptides having different amino acid sequences.

[0362] In addition, heterodimerized antibody production techniques that use association of antibody CH1 and CL, and association of VH and VL, which are described in WO 2011/028952, can also be used.

[0363] As with the method described in WO 2008/119353 and WO 2011/131746, it is also possible to use the technique of producing heterodimerized antibodies by producing two types of homodimerized antibodies in advance, incubating the antibodies under reducing conditions to dissociate them, and allowing them to associate again.

[0364] As with the method described in Strop (J. Mol. Biol. 420:204-219 (2012)), it is also possible to use the technique of producing heterodimerized antibodies by introducing charged residues such as Lys, Arg, Glu, and Asp so that electrostatic repulsion is introduced into CH3 domains.

[0365] Furthermore, as with the method described in WO 2012/058768, it is also possible to use the technique of producing heterodimerized antibodies by adding alterations to the CH2 and CH3 domains.

[0366] When simultaneously expressing two polypeptides comprising a variant Fc region which have different amino acid sequences, in order to produce polypeptides comprising heterologous variant Fc regions, polypeptides comprising homologous variant Fc regions are also usually produced as impurities. In such cases, polypeptides comprising heterologous variant Fc regions can be efficiently obtained by separating and purifying them from polypeptides comprising homologous variant Fc regions using known technologies. A method has been reported to efficiently separate and purify heterodimerized antibodies from a homodimerized antibodies using ion exchange chromatography, by introducing amino acid alterations into the variable regions of the two types of antibody heavy chains to create a difference in isoelectric points between the homodimerized antibodies and the heterodimerized antibodies (WO 2007/114325). Another method has been reported to purify heterodimerized antibodies using Protein A chromatography, by constructing a heterodimerized antibody comprising two types of heavy chains derived from mouse IgG2a that binds to Protein A and rat IgG2b that does not bind to Protein A (WO 1998/050431 and WO 1995/033844).

[0367] Furthermore, a heterodimerized antibody can be efficiently purified using Protein A chromatography, by substituting amino acid residues at positions 435 and 436 (EU numbering), which are located in the Protein A binding site of an antibody heavy chain, with amino acids such as Tyr or His, to yield different Protein A binding affinities.

[0368] In the present invention, amino acid alteration means any of substitution, deletion, addition, insertion, and modification, or a combination thereof. In the present invention, amino acid alteration may be rephrased as amino acid mutation.

[0369] When substituting amino acid residues, substitution to a different amino acid residue can be carried out with the objective of altering aspects such as (a)-(c) described below: (a) polypeptide backbone structure in the sheet-structure or helical-structure region; (b) electric charge or hydrophobicity at the target site; or (c) size of the side chain.

[0370] Amino acid residues are classified into the following groups based on their general side chain properties: (a) hydrophobic: Norleucine, Met, Ala, Val, Leu, and Ile; (b) neutral hydrophilic: Cys, Ser, Thr, Asn, and Gln; (c) acidic: Asp and Glu; (d) basic: His, Lys, and Arg; (e) residues that affect the chain orientation: Gly and Pro; and (f) aromatic: Trp, Tyr, and Phe.

[0371] Amino acid alterations are produced by various methods known to those skilled in the art. Such methods include the site-directed mutagenesis method (Hashimoto-Gotoh et al., Gene 152:271-275 (1995); Zoller, Meth. Enzymol. 100:468-500 (1983); Kramer et al., Nucleic Acids Res. 12: 9441-9456 (1984)); Kramer and Fritz, Methods Enzymol. 154: 350-367 (1987); and Kunkel, Proc. Natl. Acad. Sci. USA 82:488-492 (1985)), the PCR mutation method, and the cassette mutation method, but are not limited thereto.

[0372] The number of amino acid alterations introduced into an Fc region is not limited. In certain embodiments, it can be 1, 2 or less, 3 or less, 4 or less, 5 or less, 6 or less, 8 or less, 10 or less, 12 or less, 14 or less, 16 or less, 18 or less, or 20 or less.

[0373] Amino acid modification includes post-translational modification. A specific post-translational modification may be addition or deletion of a sugar chain. For example, the amino acid residue at position 297 (EU numbering) in the IgG1 constant region may be sugar chain-modified. The sugar chain structure for the modification is not limited. For example, sialic acid may be added to the sugar chain of an Fc region (MAbs 2010 September-October, 2(5): 519-527). Generally, antibodies expressed in eukaryotic cells comprise glycosylation in the constant region. For example, it is known that some type of sugar chain are normally added to antibodies expressed in cells such as naturally-occurring antibody-producing cells of mammals or eukaryotic cells transformed with an expression vector comprising a DNA encoding an antibody.

[0374] Eukaryotic cells shown here include yeast and animal cells. For example, CHO cells and HEK293 cells are representative animal cells used in transformation with an expression vector comprising an antibody-encoding DNA. On the other hand, constant regions without glycosylation are also included in the present invention. Antibodies whose constant region is not glycosylated can be obtained by expressing an antibody-encoding gene in prokaryotic cells such as Escherichia coli.

[0375] Furthermore, a polypeptide comprising a variant Fc region of the present invention may be chemically modified with various molecules such as polyethylene glycol (PEG) and cytotoxic substances. Methods for such chemical modification of a polypeptide are established in the art.

[0376] In one aspect, the invention provides an isolated polypeptide comprising a variant Fc region with enhanced FcγRIIb-binding activity. In some aspects, the polypeptide is an antibody. In some aspects, the polypeptide is an Fc fusion protein. In one aspect, the invention provides an isolated polypeptide comprising a variant Fc region with enhanced FcγRIIb-binding activity. In some aspects, the polypeptide is an antibody. In certain embodiments, an antibody is a chimeric antibody, or a humanized antibody. The origin of an antibody is not particularly limited, but examples include a human antibody, a mouse antibody, a rat antibody, and a rabbit antibody. In some aspects, the polypeptide is an Fc fusion protein.

[0377] In particular aspects, an anti-myostatin antibody comprises a variant Fc region provided herein. In some embodiments, the antibody binds latent myostatin but does not bind mature myostatin. In some embodiments, the antibody binds myostatin propeptide but does not bind mature myostatin. In further embodiments, the anti-myostatin antibody is an antibody disclosed herein. In further embodiments, the anti-myostatin antibody comprises a VH and VL pair, or a HVR-H3, HVR-H2, HVR-H, HVR-L3, HVR-L2, or HVR-L1 as described in Table 2a, 11a, or 13. In further embodiments, the anti-myostatin antibody binds to the same epitope as, or competes for binding latent myostatin with, an antibody comprising a VH and VL pair as described herein. In further embodiments, the anti-myostatin antibody binds to the same epitope as, or competes for binding latent myostatin with, an antibody comprising a VH and VL pair as described in Table 2a, 11a, or 13.

[0378] The variable regions of antibodies that comprise a variant Fc region provided herein and the protein binding motifs of Fc fusion proteins comprising a variant Fc region can recognize any antigen. Examples of antigens that can be bound by such antibodies and fusion proteins include, but are not limited to ligands (cytokines, chemokines, growth factors, and such), receptors, cancer antigens, MHC antigens, differentiation antigens, immunoglobulins, and immune complexes partly containing immunoglobulins.

[0379] Examples of cytokines that can be bound by an antibody or fusion protein containing a variant Fc region of the invention, and/or recombinantly fused with a polypeptide comprising a disclosed variant Fc region include but are not limited to, interleukins 1 to 18, colony stimulating factors (G-CSF, M-CSF, GM-CSF, etc.), interferons (IFN-α, IFN-β, IFN-γ, etc.), growth factors (EGF, FGF, IGF, NGF, PDGF, TGF, HGF, etc.), tumor necrosis factors (TNF-α and TNF-β), lymphotoxin, erythropoietin, leptin, SCF, TPO, MCAF, and BMP.

[0380] Examples of chemokines that can be bound by an antibody or fusion protein containing a variant Fc region of the invention, and/or recombinantly fused with a polypeptide comprising a disclosed variant Fc region include but are not limited to, CC chemokines such as CCL1 to CCL28, CXC chemokines such as CXCL1 to CXCL17, C chemokines such as XCL1 to XCL2, and CX3C chemokines such as CX3CL1.

[0381] Examples of receptors that can be bound by an antibody or fusion protein containing a variant Fc region of the invention, and/or recombinantly fused with a polypeptide comprising a disclosed variant Fc region include but are not limited to, receptors belonging to receptor families such as the hematopoietic growth factor receptor family, cytokine receptor family, tyrosine kinase-type receptor family, serine/threonine kinase-type receptor family, TNF receptor family, G protein-coupled receptor family, GPI anchor-type receptor family, tyrosine phosphatase-type receptor family, adhesion factor family, and hormone receptor family. The receptors belonging to these receptor families and their characteristics have been described in many documents such as Cooke, ed. New Comprehesive Biochemistry Vol. 18B “Hormones and their Actions Part II” pp. 1-46 (1988) Elsevier Science Publishers BV; Patthy (Cell 61(1):13-14 (1990)); Ullrich (Cell61(2):203-212 (1990)); Massagué (Cell 69(6):1067-1070 (1992)); Miyajima et al. (Annu. Rev. Immunol 10:295-331 (1992)); Taga et al. (FASEB J. 6:3387-3396 (1992)); Fantl et al. (Annu. Rev. Biochem. 62:453-481 (1993)); Smith et al. (Cell 76(6):959-962 (1994)); and Flower (Biochim. Biophys. Acta 1422(3): 207-234 (1999)).

[0382] Examples of specific receptors belonging to the above-mentioned receptor families include human or mouse erythropoietin (EPO) receptors (Jones et al., Blood 76(1):31-35 (1990); D'Andrea et al., Cell 57(2):277-285 (1989)), human or mouse granulocyte-colony stimulating factor (G-CSF) receptors (Fukunaga et al., Proc. Natl. Acad. Sci. USA 87(22):8702-8706 (1990), mG-CSFR; Fukunaga et al., Cell 61(2): 341-350 (1990)), human or mouse thrombopoietin (TPO) receptors (Vigon et al., Proc. Natl. Acad. Sci. USA. 89(12):5640-5644 (1992); Skoda et al., EMBO J. 12(7):2645-2653 (1993)), human or mouse insulin receptors (Ullrich et al., Nature 313(6005):756-761 (1985)), human or mouse Flt-3 ligand receptors (Small et al., Proc. Natl. Acad. Sci. USA. 91(2):459-463 (1994)), human or mouse platelet-derived growth factor (PDGF) receptors (Gronwald et al., Proc. Natl. Acad. Sci. USA. 85(10):3435-3439 (1988)), human or mouse interferon (IFN)-α and β receptors (Uze et al., Cell 60(2): 225-234 (1990); Novick et al., Cell 77(3):391-400 (1994)), human or mouse leptin receptors, human or mouse growth hormone (GH) receptors, human or mouse interleukin (IL)-10 receptors, human or mouse insulin-like growth factor (IGF)-I receptors, human or mouse leukemia inhibitory factor (LIF) receptors, and human or mouse ciliary neurotrophic factor (CNTF) receptors.

[0383] Cancer antigens are antigens that are expressed as cells become malignant, and they are also called tumor-specific antigens. Abnormal sugar chains that appear on cell surfaces or protein molecules when cells become cancerous are also cancer antigens, and they are also called sugar-chain cancer antigens. Examples of cancer antigens that can be bound by an antibody or fusion protein containing a variant Fc region of the invention include but are not limited to, GPC3 which is a receptor belonging to the GPI anchor-type receptor family mentioned above, and is also expressed in several cancers including liver cancer (Midorikawa et al., Int. J. Cancer 103(4):455-465 (2003)), as well as EpCAM which is expressed in several cancers including lung cancer (Linnenbach et al., Proc. Natl. Acad. Sci. USA 86(1):27-31 (1989)), CA19-9, CA15-3, and sialyl SSEA-1 (SLX).

[0384] MHC antigens are roughly classified into MHC class I antigens and MHC class II antigens. MHC class I antigens include HLA-A, -B, -C, -E, -F, -G, and -H, and MHC class II antigens include HLA-DR, -DQ, and -DP.

[0385] Examples of differentiation antigens that can be bound by an antibody or fusion protein containing a variant Fc region of the invention, and/or recombinantly fused with a polypeptide comprising a disclosed variant Fc region include but are not limited to, CD1, CD2, CD4, CD5, CD6, CD7, CD8, CD10, CD11a, CD11b, CD11c, CD13, CD14, CD15s, CD16, CD18, CD19, CD20, CD21, CD23, CD25, CD28, CD29, CD30, CD32, CD33, CD34, CD35, CD38, CD40, CD41a, CD41b, CD42a, CD42b, CD43, CD44, CD45, CD45RO, CD48, CD49a, CD49b, CD49c, CD49d, CD49e, CD49f, CD51, CD54, CD55, CD56, CD57, CD58, CD61, CD62E, CD62L, CD62P, CD64, CD69, CD71, CD73, CD95, CD102, CD106, CD122, CD126, and CDw130.

[0386] Immunoglobulins include IgA, IgM, IgD, IgG, and IgE. Immune complexes include a component of at least any of the immunoglobulins.

[0387] Other examples of antigens that can be bound by an antibody or fusion protein containing a variant Fc region of the invention, and/or recombinantly fused with a polypeptide comprising a disclosed variant Fc region include but are not limited to, 17-IA, 4-1BB, 4Dc, 6-keto-PGF1a, 8-iso-PGF2a, 8-oxo-dG, A1 adenosine receptor, A33, ACE, ACE-2, activin, activin A, activin AB, activin B, activin C, activin RIA, activin RIA ALK-2, activin RIB ALK-4, activin RIIA, activin RIIB, ADAM, ADAM10, ADAM12, ADAM15, ADAM17/TACE, ADAMS, ADAM9, ADAMTS, ADAMTS4, ADAMTS5, addressin, aFGF, ALCAM, ALK, ALK-1, ALK-7, alpha-1-antitrypsin, alpha-V/beta-1 antagonist, ANG, Ang, APAF-1, APE, APJ, APP, APRIL, AR, ARC, ART, artemin, anti-Id, ASPARTIC, atrial natriuretic peptide, av/b3 integrin, Ax1, b2M, B7-1, B7-2, B7-H, B-lymphocyte stimulating factor (BlyS), BACE, BACE-1, Bad, BAFF, BAFF-R, Bag-1, BAK, Bax, BCA-1, BCAM, Bcl, BCMA, BDNF, b-ECGF, bFGF, BID, Bik, BIM, BLC, BL-CAM, BLK, BMP, BMP-2 BMP-2a, BMP-3 Osteogenin, BMP-4, BMP-2b, BMP-5, BMP-6 Vgr-1, BMP-7 (OP-1), BMP-8 (BMP-8a, OP-2), BMPR, BMPR-IA (ALK-3), BMPR-IB (ALK-6), BRK-2, RPK-I, BMPR-II (BRK-3), BMP, b-NGF, BOK, bombesin, bone-derived neurotrophic factor, BPDE, BPDE-DNA, BTC, complement factor 3 (C3), C3a, C4, C5, C5a, C10, CA125, CAD-8, calcitonin, cAMP, carcinoembryonic antigen (CEA), cancer associated antigen, cathepsin A, cathepsin B, cathepsin C/DPPI, cathepsin D, cathepsin E, cathepsin H, cathepsin L, cathepsin O, cathepsin S, cathepsin V, cathepsin X/Z/P, CBL, CCI, CCK2, CCL, CCL1, CCL11, CCL12, CCL13, CCL14, CCL15, CCL16, CCL17, CCL18, CCL19, CCL2, CCL20, CCL21, CCL22, CCL23, CCL24, CCL25, CCL26, CCL27, CCL28, CCL3, CCL4, CCL5, CCL6, CCL7, CCL8, CCL9/10, CCR, CCR1, CCR10, CCR11, CCR2, CCR3, CCR4, CCR5, CCR6, CCR7, CCR8, CCR9, CD1, CD2, CD3, CD3E, CD4, CD5, CD6, CD7, CD8, CD10, CD11a, CD11b, CD11c, CD13, CD14, CD15, CD16, CD18, CD19, CD20, CD21, CD22, CD23, CD25, CD27L, CD28, CD29, CD30, CD30L, CD32, CD33 (p67 protein), CD34, CD38, CD40, CD40L, CD44, CD45, CD46, CD49a, CD52, CD54, CD55, CD56, CD61, CD64, CD66e, CD74, CD80 (B7-1), CD89, CD95, CD123, CD137, CD138, CD140a, CD146, CD147, CD148, CD152, CD164, CEACAM5, CFTR, cGMP, CINC, Botulinum toxin, Clostridium perfringens toxin, CKb8-1, CLC, CMV, CMV UL, CNTF, CNTN-1, COX, C-Ret, CRG-2, CT-1, CTACK, CTGF, CTLA-4, CX3CL1, CX3CR1, CXCL, CXCL1, CXCL2, CXCL3, CXCL4, CXCL5, CXCL6, CXCL7, CXCL8, CXCL9, CXCL10, CXCL11, CXCL12, CXCL13, CXCL14, CXCL15, CXCL16, CXCR, CXCR1, CXCR2, CXCR3, CXCR4, CXCR5, CXCR6, cytokeratin tumor associated antigen, DAN, DCC, DcR3, DC-S1GN, complement regulatory factor (Decay accelerating factor), des(1-3)-IGF-I (brain IGF-1), Dhh, digoxin, DNAM-1, Dnase, Dpp, DPPIV/CD26, Dtk, ECAD, EDA, EDA-A1, EDA-A2, EDAR, EGF, EGFR (ErbB-1), EMA, EMMPRIN, ENA, endothelin receptor, enkephalinase, eNOS, Eot, eotaxin 1, EpCAM, ephrin B2/EphB4, EPO, ERCC, E-selectin, ET-1, factor IIa, factor VII, factor VIIIc, factor IX, fibroblast activation protein (FAP), Fas, FcR1, FEN-1, ferritin, FGF, FGF-19, FGF-2, FGF3, FGF-8, FGFR, FGFR-3, fibrin, FL, FLIP, Flt-3, Flt-4, follicle stimulating hormone, fractalkine, FZD1, FZD2, FZD3, FZD4, FZD5, FZD6, FZD7, FZD8, FZD9, FZD10, G250, Gas6, GCP-2, GCSF, GD2, GD3, GDF, GDF-1, GDF-3 (Vgr-2), GDF-5 (BMP-14, CDMP-1), GDF-6 (BMP-13, CDMP-2), GDF-7 (BMP-12, CDMP-3), GDF8 (myostatin), GDF-9, GDF-15 (MIC-1), GDNF, GFAP, GFRa-1, GFR-alpha1, GFR-alpha2, GFR-alpha3, GITR, glucagon, Glut4, glycoprotein IIb/IIIa (GPIIb/IIIa), GM-CSF, gp130, gp72, GRO, growth hormone releasing hormone, hapten (NP-cap or NIP-cap), HB-EGF, HCC, HCMV gB envelope glycoprotein, HCMV gH envelope glycoprotein, HCMV UL, hematopoietic growth factor (HGF), Hep B gp120, heparanase, Her2, Her2/neu (ErbB-2), Her3 (ErbB-3), Her4 (ErbB-4), herpes simplex virus (HSV) gB glycoprotein, HSV gD glycoprotein, HGFA, high molecular weight melanoma-associated antigen (HMW-MAA), HIV gp120, HIV IIIB gp 120 V3 loop, HLA, HLA-DR, HM1.24, HMFG PEM, HRG, Hrk, human cardiac myosin, human cytomegalovirus (HCMV), human growth hormone (HGH), HVEM, 1-309, IAP, ICAM, ICAM-1, ICAM-3, ICE, ICOS, IFNg, Ig, IgA receptor, IgE, IGF, IGF binding protein, IGF-1R, IGFBP, IGF-I, IGF-II, IL, IL-1, IL-1R, IL-2, IL-2R, IL-4, IL-4R, IL-5, IL-5R, IL-6, IL-6R, IL-8, IL-9, IL-10, IL-12, IL-13, IL-5, IL-18, IL-18R, IL-23, interferon (IFN)-alpha, IFN-beta, IFN-gamma, inhibin, iNOS, insulin A chain, insulin B chain, insulin-like growth factor1, integrin alpha2, integrin alpha3, integrin alpha4, integrin alpha4/beta1, integrin alpha4/beta7, integrin alpha5 (alpha V), integrin alpha5/beta1, integrin alpha5/beta3, integrin alpha6, integrin beta1, integrin beta2, interferon gamma, IP-10, I-TAC, JE, kallikrein 2, kallikrein 5, kallikrein 6, kallikrein II, kallikrein 12, kallikrein 14, kallikrein 15, kallikrein L1, kallikrein L2, kallikrein L3, kallikrein L4, KC, KDR, keratinocyte growth factor (KGF), laminin 5, LAMP, LAP, LAP (TGF-1), latent TGF-1, latent TGF-1 bpi, LBP, LDGF, LECT2, lefty, Lewis-Y antigen, Lewis-Y associated antigen, LFA-1, LFA-3, Lfo, LIF, LIGHT, lipoprotein, LIX, LKN, Lptn, L-selectin, LT-a, LT-b, LTB4, LTBP-1, lung surface, luteinizing hormone, lymphotoxin beta receptor, Mac-1, MAdCAM, MAG, MAP2, MARC, MCAM, MCK-2, MCP, M-CSF, MDC, Mer, METALLOPROTEASES, MGDF receptor, MGMT, MHC (HLA-DR), MIF, MIG, MIP, MIP-1-alpha, MK, MMAC1, MMP, MMP-1, MMP-10, MMP-11, MMP-12, MMP-13, MMP-14, MMP-15, MMP-2, MMP-24, MMP-3, MMP-7, MMP-8, MMP-9, MPIF, Mpo, MSK, MSP, mucin (Muc1), MUC18, Mullerian-inhibiting substance, Mug, MuSK, NAIP, NAP, NCAD, N-Cadherin, NCA 90, NCAM, neprilysin, neurotrophin-3, -4, or -6, neurturin, nerve growth factor (NGF), NGFR, NGF-beta, nNOS, NO, NOS, Npn, NRG-3, NT, NTN, OB, OGG1, OPG, OPN, OSM, OX40L, OX40R, p150, p95, PADPr, parathyroid hormone, PARC, PARP, PBR, PBSF, PCAD, P-cadherin, PCNA, PDGF, PDK-1, PECAM, PEM, PF4, PGE, PGF, PGI2, PGJ2, PIN, PLA2, placental alkaline phosphatase (PLAP), PIGF, PLP, PP 14, proinsulin, prorelaxin, protein C, PS, PSA, PSCA, prostate-specific membrane antigen (PSMA), PTEN, PTHrp, Ptk, PTN, R51, RANK, RANKL, RANTES, relaxin A chain, relaxin B chain, renin, respiratory syncytial virus (RSV) F, RSV Fgp, Ret, Rheumatoid factor, RLIP76, RPA2, RSK, S100, SCF/KL, SDF-1, SERINE, serum albumin, sFRP-3, Shh, SIGIRR, SK-1, SLAM, SLPI, SMAC, SMDF, SMOH, SOD, SPARC, Stat, STEAP, STEAP-II, TACE, TACI, TAG-72 (tumor-associated glycoprotein-72), TARC, TCA-3, T-cell receptor (for example, T-cell receptor alpha/beta), TdT, TECK, TEM1, TEM5, TEM7, TEM8, TERT, testis PLAP-like alkaline phosphatase, TfR, TGF, TGF-alpha, TGF-beta, TGF-beta Pan Specific, TGF-betaRI (ALK-5), TGF-betaRII, TGF-betaRIIb, TGF-betaRIII, TGF-beta1, TGF-beta2, TGF-beta3, TGF-beta4, TGF-beta5, thrombin, thymus Ck-1, thyroid-stimulating hormone, Tie, TIMP, TIQ, tissue factor, TMEFF2, Tmpo, TMPRSS2, TNF, TNF-alpha, TNF-alphabeta, TNF-beta2, TNFc, TNF-RI, TNF-RII, TNFRSF10A (TRAIL R1 Apo-2, DR4), TNFRSF10B (TRAIL R2 DR5, KILLER, TRICK-2A, TRICK-B), TNFRSF10C (TRAIL R3 DcR1, LIT, TRID), TNFRSF10D (TRAIL R4 DcR2, TRUNDD), TNFRSF11A (RANK ODF R, TRANCE R), TNFRSF11B (OPG OCIF, TR1), TNFRSF12 (TWEAK R FN14), TNFRSF13B (TACI), TNFRSF13C (BAFF R), TNFRSF14 (HVEM ATAR, HveA, LIGHT R, TR2), TNFRSF16 (NGFR p75NTR), TNFRSF17 (BCMA), TNFRSF18 (GITR AITR), TNFRSF19 (TROY TAJ, TRADE), TNFRSF19L (RELT), TNFRSF1A (TNF RI CD120a, p55-60), TNFRSF1B (TNF RII CD120b, p75-80), TNFRSF26 (TNFRH3), TNFRSF3 (LTbR TNF RIII, TNFC R), TNFRSF4 (OX40 ACT35, TXGP1 R), TNFRSF5 (CD40 p50), TNFRSF6 (Fas Apo-1, APT1, CD95), TNFRSF6B (DcR3 M68, TR6), TNFRSF7 (CD27), TNFRSF8 (CD30), TNFRSF9 (4-1BB CD137, ILA), TNFRSF21 (DR6), TNFRSF22 (DcTRAIL R2 TNFRH2), TNFRST23 (DcTRAIL R1 TNFRH1), TNFRSF25 (DR3 Apo-3, LARD, TR-3, TRAMP, WSL-1), TNFSF10 (TRAIL Apo-2 ligand, TL2), TNFSF11 (TRANCE/RANK ligand ODF, OPG ligand), TNFSF12 (TWEAK Apo-3 ligand, DR3 ligand), TNFSF13 (APRIL TALL2), TNFSF13B (BAFF BLYS, TALLI, THANK, TNFSF20), TNFSF14 (LIGHT HVEM ligand, LTg), TNFSF15 (TL1A/VEGI), TNFSF18 (GITR ligand AITR ligand, TL6), TNFSF1A (TNF-a Conectin, DIF, TNFSF2), TNFSF1B (TNF-b LTa, TNFSF1), TNFSF3 (LTb TNFC, p33), TNFSF4 (OX40 ligand gp34, TXGP1), TNFSF5 (CD40 ligand CD154, gp39, HIGM1, IMD3, TRAP), TNFSF6 (Fas ligand Apo-ligand, APT1 ligand), TNFSF7 (CD27 ligand CD70), TNFSF8 (CD30 ligand CD153), TNFSF9 (4-1BB ligand CD137 ligand), TP-1, t-PA, Tpo, TRAIL, TRAIL R, TRAIL-R1, TRAIL-R2, TRANCE, transferrin receptor, TRF, Trk, TROP-2, TSG, TSLP, tumor associated antigen CA125, tumor associated antigen expressing Lewis-Y associated carbohydrates, TWEAK, TXB2, Ung, uPAR, uPAR-1, urokinase, VCAM, VCAM-1, VECAD, VE-Cadherin, VE-cadherin-2, VEFGR-1 (flt-1), VEGF, VEGFR, VEGFR-3 (flt-4), VEGI, VIM, virus antigen, VLA, VLA-1, VLA-4, VNR integrin, von Willebrand factor, WIF-1, WNT1, WNT2, WNT2B/13, WNT3, WNT3A, WNT4, WNT5A, WNT5B, WNT6, WNT7A, WNT7B, WNT8A, WNT8B, WNT9A, WNT9B, WNT10A, WNT10B, WNT11, WNT16, XCL1, XCL2, XCR1, XCR1, XEDAR, XIAP, XPD, HMGB1, IgA, Aβ, CD81, CD97, CD98, DDR1, DKK1, EREG, Hsp90, IL-17/IL-17R, IL-20/IL-20R, oxidized LDL, PCSK9, prekallikrein, RON, TMEM16F, SOD 1, Chromogranin A, Chromogranin B, tau, VAP1, high molecular weight kininogen, IL-31, IL-31R, Nav1.1, Nay 1.2, Nav1.3, Nav1.4, Nav1.5, Nav1.6, Nav1.7, Nav1.8, Nav1.9, EPCR, C1, C1q, C1r, C1s, C2, C2a, C2b, C3, C3a, C3b, C4, C4a, C4b, C5, C5a, C5b, C6, C7, C8, C9, factor B, factor D, factor H, properdin, sclerostin, fibrinogen, fibrin, prothrombin, thrombin, tissue factor, factor V, factor Va, factor VII, factor VIa, factor VIII, factor VIIIa, factor IX, factor IXa, factor X, factor Xa, factor XI, factor XIa, factor XII, factor XIIa, factor XIII, factor XIIIa, TFPI, antithrombin III, EPCR, thrombomodulin, TAPI, tPA, plasminogen, plasmin, PAI-1, PAI-2, GPC3, Syndecan-1, Syndecan-2, Syndecan-3, Syndecan-4, LPA, and SIP; and receptors for hormone and growth factors.

[0388] As discussed herein, one or more amino acid residue alterations are allowed in the amino acid sequences constituting the variable regions as long as their antigen-binding activities are maintained. When altering a variable region amino acid sequence, there is no particularly limitation on the site of alteration and number of amino acids altered. For example, amino acids present in CDR and/or FR can be altered appropriately. When altering amino acids in a variable region, the binding activity is preferably maintained without particular limitation; and for example, as compared to before alteration, the binding activity may be 50% or more, 80% or more, and 100% or more. Furthermore, the binding activity may be increased by amino acid alterations. For example, the binding activity may be 2-, 5-, 10-times higher or such than that before alteration. Alteration of amino acid sequence may be at least one of amino acid residue substitution, addition, deletion, and modification.

[0389] For example, the modification of the N-terminal glutamine of a variable region into pyroglutamic acid by pyroglutamylation is a modification well known to those skilled in the art. Thus, when the heavy-chain N terminus is glutamine, antibodies described herein may comprise the variable regions in which the glutamine is modified to pyroglutamic acid.

[0390] Antibody variable regions described herein may have any sequences, and they may be antibody variable regions of any origin, such as mouse antibodies, rat antibodies, rabbit antibodies, goat antibodies, camel antibodies, humanized antibodies produced by humanizing these non-human antibodies, and human antibodies. Furthermore, these antibodies may have various amino acid substitutions introduced into their variable regions to improve their antigen binding, pharmacokinetics, stability, and immunogenicity. Variable regions may be able to bind antigens repeatedly due to their pH dependency in antigen binding (WO 2009/125825).

[0391] κ chain and λ chain are present in antibody light-chain constant regions, and either one is acceptable. Furthermore, they may have some amino acid alterations such as substitutions, deletions, additions, and/or insertions.

[0392] Furthermore, polypeptides comprising variant Fc regions described herein may be made into Fc fusion proteins by linking to other proteins such as physiologically active peptides. Such fusion proteins may be a multimer of at least two polypeptides comprising the variant Fc regions. Examples of the other proteins include receptors, adhesion molecules, ligands, and enzymes, but are not limited thereto.

[0393] Examples of Fc fusion proteins include proteins fused with an Fc region to a receptor that binds to a target molecule, including TNFR-Fc fusion protein, IL1R-Fc fusion protein, VEGFR-Fc fusion protein, and CTLA4-Fc fusion protein (Economides et al., Nat. Med. 9(1):47-52 (2003); Dumont et al., BioDrugs. 20(3):151-60 (2006)). Furthermore, proteins to be fused may be other molecules that have a target-binding activity, for example, scFvs (WO 2005/037989), single-domain antibodies (WO 2004/058821; WO 2003/002609), antibody-like molecules (Davinder, Curr. Op. Biotech. 17:653-658 (2006); Current Opinion in Biotechnology 18:1-10 (2007); Nygren et al., Curr. Op. Struct. Biol. 7:463-469 (1997); and Hoss. Protein Science 15:14-27 (2006)) such as DARPins (WO 2002/020565), Affibody (WO 1995/001937), Avimer (WO 2004/044011; WO 2005/040229), and Adnectin (WO 2002/032925). Furthermore, antibodies and Fc fusion proteins may be multispecific and may bind to multiple types of target molecules or epitopes.

[0394] B. Recombinant Methods and Compositions

[0395] Antibodies may be produced using recombinant methods and compositions, e.g., as described in U.S. Pat. No. 4,816,567. In one embodiment, isolated nucleic acid encoding an anti-myostatin antibody described herein is provided. In another embodiment, isolated nucleic acid encoding a polypeptide comprising a variant Fc region or a parent Fc region described herein is provided. Such nucleic acid may encode an amino acid sequence comprising the VL and/or an amino acid sequence comprising the VH of the antibody (e.g., the light and/or heavy chains of the antibody). In a further embodiment, one or more vectors (e.g., expression vectors) comprising such nucleic acid are provided. In a further embodiment, a host cell comprising such nucleic acid is provided. In one embodiment, a host cell comprises (e.g., has been transformed with): (1) a vector comprising a nucleic acid that encodes an amino acid sequence comprising the VL of the antibody and an amino acid sequence comprising the VH of the antibody, or (2) a first vector comprising a nucleic acid that encodes an amino acid sequence comprising the VL of the antibody and a second vector comprising a nucleic acid that encodes an amino acid sequence comprising the VH of the antibody. In one embodiment, the host cell is eukaryotic, e.g., a Chinese Hamster Ovary (CHO) cell or lymphoid cell (e.g., a Y0, NS0, and Sp20 cell). In one embodiment, a method of making an anti-myostatin antibody is provided, wherein the method comprises culturing a host cell comprising a nucleic acid encoding the antibody, as provided above, under conditions suitable for expression of the antibody, and optionally recovering the antibody from the host cell (or host cell culture medium). In another embodiment, a method of making a polypeptide comprising a variant Fc region or a parent Fc region is provided, wherein the method comprises culturing a host cell comprising the nucleic acid(s) encoding a polypeptide such as, an antibody, Fc region, or variant Fc region, as provided herein, under conditions suitable for expression of the polypeptide, and optionally recovering the polypeptide from the host cell (or host cell culture medium).

[0396] For recombinant production of an anti-myostatin antibody, nucleic acids encoding an antibody, e.g., as described above, is isolated and inserted into one or more vectors for further cloning and/or expression in a host cell. For recombinant production of an Fc region, nucleic acid encoding an Fc region is isolated and inserted into one or more vectors for further cloning and/or expression in a host cell. Such nucleic acid may be readily isolated and sequenced using conventional procedures (e.g., using oligonucleotide probes that are capable of binding specifically to genes encoding the heavy and light chains of the antibody).

[0397] Suitable host cells for cloning or expression of antibody-encoding vectors include prokaryotic or eukaryotic cells described herein. For example, antibodies may be produced in bacteria, in particular when glycosylation and Fc effector function are not needed. For expression of antibody fragments and polypeptides in bacteria, see, e.g., U.S. Pat. Nos. 5,648,237, 5,789,199, and 5,840,523. (See also, Charlton, Methods in Molecular Biology, Vol. 248 (B. K. C. Lo, ed., Humana Press, Totowa, N. J., 2003), pp. 245-254, describing expression of antibody fragments in E. coli.) After expression, the antibody may be isolated from the bacterial cell paste in a soluble fraction and can be further purified.

[0398] In addition to prokaryotes, eukaryotic microbes such as filamentous fungi or yeast are suitable cloning or expression hosts for antibody-encoding vectors, including fungi and yeast strains whose glycosylation pathways have been “humanized,” resulting in the production of an antibody with a partially or fully human glycosylation pattern. See Gerngross, Nat. Biotech. 22:1409-1414 (2004), and Li et al., Nat. Biotech. 24:210-215 (2006).

[0399] Suitable host cells for the expression of glycosylated antibody are also derived from multicellular organisms (invertebrates and vertebrates). Examples of invertebrate cells include plant and insect cells. Numerous baculoviral strains have been identified which may be used in conjunction with insect cells, particularly for transfection of Spodoptera frugiperda cells.

[0400] Plant cell cultures can also be utilized as hosts. See, e.g., U.S. Pat. Nos. 5,959,177, 6,040,498, 6,420,548, 7,125,978, and 6,417,429 (describing PLANTIBODIES™ technology for producing antibodies in transgenic plants).

[0401] Vertebrate cells may also be used as hosts. For example, mammalian cell lines that are adapted to grow in suspension may be useful. Other examples of useful mammalian host cell lines are monkey kidney CV1 line transformed by SV40 (COS-7); human embryonic kidney line (293 or 293 cells as described, e.g., in Graham et al., J. Gen Virol. 36:59 (1977)); baby hamster kidney cells (BHK); mouse sertoli cells (TM4 cells as described, e.g., in Mather, Biol. Reprod. 23:243-251 (1980)); monkey kidney cells (CV1); African green monkey kidney cells (VERO-76); human cervical carcinoma cells (HELA); canine kidney cells (MDCK; buffalo rat liver cells (BRL 3A); human lung cells (W138); human liver cells (Hep G2); mouse mammary tumor (MMT 060562); TRI cells, as described, e.g., in Mather et al., Annals N. Y. Acad. Sci. 383:44-68 (1982); MRC 5 cells; and FS4 cells. Other useful mammalian host cell lines include Chinese hamster ovary (CHO) cells, including DHFR⁻ CHO cells (Urlaub et al., Proc. Natl. Acad. Sci. USA 77:4216 (1980)); and myeloma cell lines such as Y0, NS0 and Sp2/0. For a review of certain mammalian host cell lines suitable for antibody production, see, e.g., Yazaki and Wu, Methods in Molecular Biology, Vol. 248 (B. K. C. Lo, ed., Humana Press, Totowa, N.J.), pp. 255-268 (2003).

[0402] Antibodies with pH-dependent characteristics may be obtained using screening methods and/or mutagenesis methods e.g., as described in WO 2009/125825. The screening methods may comprise any process by which an antibody having pH-dependent binding characteristics is identified within a population of antibodies specific for a particular antigen. In certain embodiments, the screening methods may comprise measuring one or more binding parameters (e.g., KD or kd) of individual antibodies within an initial population of antibodies both at acidic and neutral pH. The binding parameters of the antibodies may be measured using, e.g., surface plasmon resonance, or any other analytic method that allows for the quantitative or qualitative assessment of the binding characteristics of an antibody to a particular antigen. In certain embodiments, the screening methods may comprise identifying an antibody that binds to an antigen with an acidic/neutral KD ratio of 2 or greater. In further embodiments, the screening methods may comprise identifying an antibody that binds to an antigen with a pH5.8/pH7.4 KD ratio of 2 or greater. Alternatively, the screening methods may comprise identifying an antibody that binds to an antigen with an acidic/neutral kd ratio of 2 or greater. In further embodiments, the screening methods may comprise identifying an antibody that binds to an antigen with a pH5.8/pH7.4 kd ratio of 2 or greater.

[0403] In another embodiment, the mutagenesis methods may comprise incorporating a deletion, substitution, or addition of an amino acid within the heavy and/or light chain of the antibody to enhance the pH-dependent binding of the antibody to an antigen. In certain embodiments, the mutagenesis may be carried out within one or more variable domains of the antibody, e.g., within one or more HVRs (e.g., CDRs). For example, the mutagenesis may comprise substituting an amino acid within one or more HVRs (e.g., CDRs) of the antibody with another amino acid. In certain embodiments, the mutagenesis may comprise substituting one or more amino acids in at least one HVR (e.g., CDR) of the antibody with a histidine. In certain embodiments, “enhanced pH-dependent binding” means that the mutated version of the antibody exhibits a greater acidic/neutral KD ratio, or a greater acidic/neutral kd ratio, than the original “parent” (i.e., the less pH-dependent) version of the antibody prior to mutagenesis. In certain embodiments, the mutated version of the antibody has an acidic/neutral KD ratio of 2 or greater. In certain embodiments, the mutated version of the antibody has a pH5.8/pH7.4 KD ratio of 2 or greater. Alternatively, the mutated version of the antibody has an acidic/neutral kd ratio of 2 or greater. In further embodiments, the mutated version of the antibody has a pH5.8/pH7.4 kd ratio of 2 or greater.

[0404] Polyclonal antibodies are preferably raised in animals by multiple subcutaneous (sc) or intraperitoneal (ip) injections of the relevant antigen and an adjuvant. It may be useful to conjugate the relevant antigen to a protein that is immunogenic in the species to be immunized, e.g., keyhole limpet hemocyanin, serum albumin, bovine thyroglobulin, or soybean trypsin inhibitor using a bifunctional or derivatizing agent, for example, maleimidobenzoyl sulfosuccinimide ester (conjugation through cysteine residues), N-hydroxysuccinimide (through lysine residues), glutaraldehyde, succinic anhydride, SOCl₂, or R¹N═C═NR, where R and R¹ are different alkyl groups.

[0405] Animals (usually non-human mammals) are immunized against the antigen, immunogenic conjugates, or derivatives by combining, e.g., 100 μg or 5 μg of the protein or conjugate (for rabbits or mice, respectively) with 3 volumes of Freund's complete adjuvant and injecting the solution intradermally at multiple sites. One month later the animals are boosted with ⅕ to 1/10 the original amount of peptide or conjugate in Freund's complete adjuvant by subcutaneous injection at multiple sites. Seven to 14 days later the animals are bled and the serum is assayed for antibody titer. Animals are boosted until the titer plateaus. Preferably, the animal is boosted with the conjugate of the same antigen, but conjugated to a different protein and/or through a different cross-linking reagent. Conjugates also can be made in recombinant cell culture as protein fusions. Also, aggregating agents such as alum are suitably used to enhance the immune response.

[0406] Monoclonal antibodies are obtained from a population of substantially homogeneous antibodies, i.e., the individual antibodies comprising the population are identical except for possible naturally occurring mutations and/or post-translational modifications (e.g., isomerizations, amidations) that may be present in minor amounts. Thus, the modifier “monoclonal” indicates the character of the antibody as not being a mixture of discrete antibodies.

[0407] For example, the monoclonal antibodies may be made using the hybridoma method first described by Kohler et al., Nature 256(5517):495-497 (1975). In the hybridoma method, a mouse or other appropriate host animal, such as a hamster, is immunized as hereinabove described to elicit lymphocytes that produce or are capable of producing antibodies that will specifically bind to the protein used for immunization. Alternatively, lymphocytes may be immunized in vitro.

[0408] The immunizing agent will typically include the antigenic protein or a fusion variant thereof. Generally either peripheral blood lymphocytes (PBLs) are used if cells of human origin are desired, or spleen cells or lymph node cells are used if non-human mammalian sources are desired. The lymphocytes are then fused with an immortalized cell line using a suitable fusing agent, such as polyethylene glycol, to form a hybridoma cell (Goding, Monoclonal Antibodies: Principles and Practice, Academic Press (1986), pp. 59-103).

[0409] Immortalized cell lines are usually transformed mammalian cells, particularly myeloma cells of rodent, bovine and human origin. Usually, rat or mouse myeloma cell lines are employed. The hybridoma cells thus prepared are seeded and grown in a suitable culture medium that preferably contains one or more substances that inhibit the growth or survival of the unfused, parental myeloma cells. For example, if the parental myeloma cells lack the enzyme hypoxanthine guanine phosphoribosyl transferase (HGPRT or HPRT), the culture medium for the hybridomas typically will include hypoxanthine, aminopterin, and thymidine (HAT medium), which are substances that prevent the growth of HGPRT-deficient cells.

[0410] Preferred immortalized myeloma cells are those that fuse efficiently, support stable high-level production of antibody by the selected antibody-producing cells, and are sensitive to a medium such as HAT medium. Among these, preferred are murine myeloma lines, such as those derived from MOPC-21 and MPC-11 mouse tumors available from the Salk Institute Cell Distribution Center, San Diego, Calif. USA, and SP-2 cells (and derivatives thereof, e.g., X63-Ag8-653) available from the American Type Culture Collection, Manassas, Va. USA. Human myeloma and mouse-human heteromyeloma cell lines also have been described for the production of human monoclonal antibodies (Kozbor et al. J. Immunol. 133(6):3001-3005 (1984); Brodeur et al., Monoclonal Antibody Production Techniques and Applications, Marcel Dekker, Inc., New York, pp. 51-63 (1987)).

[0411] Culture medium in which hybridoma cells are growing is assayed for production of monoclonal antibodies directed against the antigen. Preferably, the binding specificity of monoclonal antibodies produced by hybridoma cells is determined by immunoprecipitation or by an in vitro binding assay, such as radioimmunoassay (RIA) or enzyme-linked immunosorbent assay (ELISA). Such techniques and assays are known in the art. For example, binding affinity may be determined by the Scatchard analysis of Munson, Anal. Biochem. 107(1):220-239 (1980).

[0412] After hybridoma cells are identified that produce antibodies of the desired specificity, affinity, and/or activity, the clones may be subcloned by limiting dilution procedures and grown by standard methods (Goding, supra). Suitable culture media for this purpose include, for example, D-MEM or RPMI-1640 medium. In addition, the hybridoma cells may be grown in vivo as tumors in a mammal.

[0413] The monoclonal antibodies secreted by the subclones are suitably separated from the culture medium, ascites fluid, or serum by conventional immunoglobulin purification procedures such as, for example, protein A-Sepharose, hydroxyapatite chromatography, gel electrophoresis, dialysis, or affinity chromatography.

[0414] Antibodies may be produced by immunizing an appropriate host animal against an antigen. In one embodiment, the antigen is a polypeptide comprising a full-length myostatin. In one embodiment, the antigen is a polypeptide comprising latent myostatin. In one embodiment, the antigen is a polypeptide comprising a myostatin propeptide. In one embodiment, the antigen is a polypeptide comprising the region corresponding to the amino acids at positions 21 to 100 of myostatin propeptide (SEQ ID NO: 78). In one embodiment, the antigen is a polypeptide comprising amino acids at positions 21-80, 41-100, 21-60, 41-80, 61-100, 21-40, 41-60, 61-80, or 81-100 of myostatin propeptide (SEQ ID NO: 78). Also included in the present invention are antibodies produced by immunizing an animal against the antigen. The antibodies may incorporate any of the features, singly or in combination, as described in “Exemplary Anti-myostatin Antibodies” above.

[0415] An Fc region may be obtained by re-eluting the fraction adsorbed onto protein A column after partially digesting IgG1, IgG2, IgG3, IgG4 monoclonal antibodies or such using a protease such as pepsin. The protease is not particularly limited as long as it can digest a full-length antibody so that Fab and F(ab′)2 will be produced in a restrictive manner by appropriately setting the enzyme reaction conditions such as pH, and examples include pepsin and papain.

[0416] Furthermore, the present invention provides a method for producing a polypeptide comprising a variant Fc region with enhanced FcγRIIb-binding activity in comparison with a polypeptide comprising a parent Fc region, which comprises introducing at least one amino acid alteration to the parent Fc region. In some aspects, the produced polypeptide is an antibody. In certain embodiments, an antibody is a chimeric antibody, or a humanized antibody. In some aspects, the produced polypeptide is an Fc fusion protein.

[0417] In certain embodiments, the production method comprises the following steps: (a) preparing a polypeptide comprising a parent Fc region; (b) introducing at least one amino acid alteration to the parent Fc region within the polypeptide; (c) measuring the monkey FcγRIIb-binding activities of the polypeptide comprising the parent Fc region and the polypeptide comprising the Fc region in step (b); and (d) selecting a polypeptide comprising a variant Fc region with enhanced monkey FcγRIIb-binding activity in comparison with the polypeptide comprising the parent Fc region.

[0418] In certain embodiments, the production method comprises the following steps: (a) preparing a polypeptide comprising a parent Fc region; (b) introducing at least one amino acid alteration to the parent Fc region within the polypeptide; (c) measuring the monkey FcγRIIIa-binding activities of the polypeptide comprising the parent Fc region and the polypeptide comprising the Fc region in step (b); and (d) selecting a polypeptide comprising a variant Fc region with decreased monkey FcγRIIIa-binding activity in comparison with the polypeptide comprising the parent Fc region.

[0419] In certain embodiments, the production method comprises the following steps: (a) preparing a polypeptide comprising a parent Fc region; (b) introducing at least one amino acid alteration to the parent Fc region within the polypeptide; (c) measuring the human FcγRIIb-binding activities of the polypeptide comprising the parent Fc region and the polypeptide comprising the Fc region in step (b); and (d) selecting a polypeptide comprising a variant Fc region with enhanced human FcγRIIb-binding activity in comparison with the polypeptide comprising the parent Fc region.

[0420] In certain embodiments, the production method comprises the following steps: (a) preparing a polypeptide comprising a parent Fc region; (b) introducing at least one amino acid alteration to the parent Fc region within the polypeptide; (c) measuring the human FcγRIIIa-binding activities of the polypeptide comprising the parent Fc region and the polypeptide comprising the Fc region in step (b); and (d) selecting a polypeptide comprising a variant Fc region with decreased human FcγRIIIa-binding activity in comparison with the polypeptide comprising the parent Fc region.

[0421] In certain embodiments, the production method comprises the following steps: (a) preparing a polypeptide comprising a parent Fc region; (b) introducing at least one amino acid alteration to the parent Fc region within the polypeptide; (c) measuring the human FcγRIIa (type H)-binding activities of the polypeptide comprising the parent Fc region and the polypeptide comprising the Fc region in step (b); and (d) selecting a polypeptide comprising a variant Fc region with decreased human FcγRIIa (type H)-binding activity in comparison with the polypeptide comprising the parent Fc region.

[0422] In certain embodiments, the production method comprises the following steps: (a) preparing a polypeptide comprising a parent Fc region; (b) introducing at least one amino acid alteration to the parent Fc region within the polypeptide; (c) measuring the human FcγRIIa (type R)-binding activities of the polypeptide comprising the parent Fc region and the polypeptide comprising the Fc region in step (b); and (d) selecting a polypeptide comprising a variant Fc region with decreased human FcγRIIa (type R)-binding activity in comparison with the polypeptide comprising the parent Fc region.

[0423] In one aspect, at least one amino acid is altered in the above-mentioned method for producing a polypeptide comprising a variant Fc region with enhanced FcγRIIb-binding activity, of at least one position selected from the group consisting of: 231, 232, 233, 234, 235, 236, 237, 238, 239, 264, 266, 267, 268, 271, 295, 298, 325, 326, 327, 328, 330, 331, 332, 334, and 396, according to EU numbering. In certain embodiments, the FcγRIIb has the sequence of cynomolgous monkey FcγRIIb (SEQ ID NO:223), In certain embodiments, the FcγRIIb has the sequence of human FcγRIIb (e.g., SEQ ID NOs:212, 213, or 214).

[0424] In another aspect, one amino acid is altered in the above-mentioned method for producing a polypeptide comprising a variant Fc region with enhanced FcγRIIb-binding activity, at position 236.

[0425] In another aspect, at least two amino acids are altered in the above-mentioned method for producing a polypeptide comprising a variant Fc region with enhanced FcγRIIb-binding activity, the alterations comprising: (a) one amino acid alteration at position 236, and (b) at least one amino acid alteration of at least one position selected from the group consisting of: 231, 232, 233, 234, 235, 237, 238, 239, 264, 266, 267, 268, 271, 295, 298, 325, 326, 327, 328, 330, 331, 332, 334, and 396, according to EU numbering. In certain embodiments, the FcγRIIb has the sequence of cynomolgous monkey FcγRIIb (SEQ ID NO:223). In certain embodiments, the FcγRIIb has the sequence of human FcγRIIb (e.g., SEQ ID NOs:212, 213, or 214).

[0426] In another aspect, at least two amino acids are altered in the above-mentioned method for producing a polypeptide comprising a variant Fc region with enhanced FcγRIb-binding activity, the alterations comprising: (a) one amino acid alteration at position 236, and (b) at least one amino acid alteration of at least one position selected from the group consisting of: 231, 232, 235, 239, 268, 295, 298, 326, 330, and 396, according to EU numbering. In certain embodiments, the FcγRIIb has the sequence of cynomolgous monkey FcγRIIb (SEQ ID NO:223). In certain embodiments, the FcγRIIb has the sequence of human FcγRIIb (e.g., SEQ ID NOs:212, 213, or 214).

[0427] In another aspect, at least two amino acids are altered in the above-mentioned method for producing a polypeptide comprising a variant Fc region with enhanced FcγRIIb-binding activity, the alterations comprising: (a) one amino acid alteration at position 236, and (b) at least one amino acid alteration of at least one position selected from the group consisting of: 268, 295, 326, and 330, according to EU numbering. In certain embodiments, the FcγRIIb has the sequence of cynomolgous monkey FcγRIIb (SEQ ID NO:223). In certain embodiments, the FcγRIIb has the sequence of human FcγRIIb (e.g., SEQ ID NOs:212, 213, or 214).

[0428] In another aspect, amino acids are altered in the above-mentioned method for producing a polypeptide comprising a variant Fc region with enhanced FcγRIIb-binding activity, at positions of any one of the following (1)-(37): (1) at positions 231, 236, 239, 268 and 330; (2) at positions 231, 236, 239, 268, 295 and 330; (3) at positions 231, 236, 268 and 330; (4) at positions 231, 236, 268, 295 and 330; (5) at positions 232, 236, 239, 268, 295 and 330; (6) at positions 232, 236, 268, 295 and 330; (7) at positions 232, 236, 268 and 330; (8) at positions 235, 236, 268, 295, 326 and 330; (9) at positions 235, 236, 268, 295 and 330; (10) at positions 235, 236, 268 and 330; (11) at positions 235, 236, 268, 330 and 396; (12) at positions 235, 236, 268 and 396; (13) at positions 236, 239, 268, 295, 298 and 330; (14) at positions 236, 239, 268, 295, 326 and 330; (15) at positions 236, 239, 268, 295 and 330; (16) at positions 236, 239, 268, 298 and 330; (17) at positions 236, 239, 268, 326 and 330; (18) at positions 236, 239, 268 and 330; (19) at positions 236, 239, 268, 330 and 396; (20) at positions 236, 239, 268 and 396; (21) at positions 236 and 268; (22) at positions 236, 268 and 295; (23) at positions 236, 268, 295, 298 and 330; (24) at positions 236, 268, 295, 326 and 330; (25) at positions 236, 268, 295, 326, 330 and 396; (26) at positions 236, 268, 295 and 330; (27) at positions 236, 268, 295, 330 and 396; (28) at positions 236, 268, 298 and 330; (29) at positions 236, 268, 298 and 396; (30) at positions 236, 268, 326 and 330; (31) at positions 236, 268, 326, 330 and 396; (32) at positions 236, 268 and 330; (33) at positions 236, 268, 330 and 396; (34) at positions 236, 268 and 396; (35) at positions 236 and 295; (36) at positions 236, 330 and 396; and (37) at positions 236 and 396; according to EU numbering. In certain embodiments, the FcγRIIb has the sequence of cynomolgous monkey FcγRIIb (SEQ ID NO:223). In certain embodiments, the FcγRIIb has the sequence of human FcγRIIb (e.g., SEQ ID NOs:212, 213, or 214).

[0429] In a further aspect, an amino acid alteration in the above-mentioned method for producing a polypeptide comprising a variant Fc region with enhanced FcγRIIb-binding activity, is selected at each position from the group consisting of: (a) Asp, Glu, Phe, Gly, His, Ile, Lys, Leu, Met, Asn, Pro, Gln, Arg, Ser, Thr, Val, Trp, Tyr at position 231; (b) Ala, Asp, Glu, Phe, Gly, His, Ile, Lys, Leu, Met, Asn, Gln, Arg, Ser, Thr, Val, Trp, Tyr at position 232; (c) Asp at position 233; (d) Trp, Tyr at position 234; (e) Trp at position 235; (f) Ala, Asp, Glu, His, Ile, Leu, Met, Asn, Gln, Ser, Thr, Val at position 236; (g) Asp, Tyr at position 237; (h) Glu, Ile, Met, Gln, Tyr at position 238; (i) Ile, Leu, Asn, Pro, Val at position 239; (j) Ile at position 264; (k) Phe at position 266; (l) Ala, His, Leu at position 267; (m) Asp, Glu at position 268; (n) Asp, Glu, Gly at position 271; (o) Leu at position 295; (p) Leu at position 298; (q) Glu, Phe, Ile, Leu at position 325; (r) Thr at position 326; (s) lie, Asn at position 327; (t) Thr at position 328; (u) Lys, Arg at position 330; (v) Glu at position 331; (w) Asp at position 332; (x) Asp, Ile, Met, Val, Tyr at position 334; and (y) Ala, Asp, Glu, Phe, Gly, His, Ile, Lys, Leu, Met, Asn, Gln, Arg, Ser, Thr, Val, Trp, Tyr at position 396; according to EU numbering. In certain embodiments, the FcγRIIb has the sequence of cynomolgous monkey FcγRIIb (SEQ ID NO:223). In certain embodiments, the FcγRIIb has the sequence of human FcγRIIb (e.g., SEQ ID NOs:212, 213, or 214).

[0430] In a further aspect, an amino acid alteration in the above-mentioned method for producing a polypeptide comprising a variant Fc region with enhanced FcγRIIb-binding activity, is selected at each position from the group consisting of: (a) Gly, Thr at position 231; (b) Asp at position 232; (c) Trp at position 235; (d) Asn, Thr at position 236; (e) Val at position 239; (f) Asp, Glu at position 268; (g) Leu at position 295; (h) Leu at position 298; (i) Thr at position 326; (j) Lys, Arg at position 330, and (k) Lys, Met at position 396; according to EU numbering. In certain embodiments, the FcγRIIb has the sequence of cynomolgous monkey FcγRIIb (SEQ ID NO:223). In certain embodiments, the FcγRIIb has the sequence of human FcγRIIb (e.g., SEQ ID NOs:212, 213, or 214).

[0431] In a further aspect, amino acid alterations in the above-mentioned method for producing a polypeptide comprising a variant Fc region with enhanced FcγRIIb-binding activity, are: Asn at position 236, Glu at position 268, Lys at position 330, and Met at position 396; according to EU numbering. In a further aspect, amino acid alterations in the above-mentioned method for producing a polypeptide comprising a variant Fc region with enhanced FcγRIIb-binding activity, are: Asn at position 236, Asp at position 268, and Lys at position 330; according to EU numbering. In a further aspect, amino acid alterations in the above-mentioned method for producing a polypeptide comprising a variant Fc region with enhanced FcγRIIb-binding activity, are: Asn at position 236, Asp at position 268, Leu at position 295, and Lys at position 330; according to EU numbering. In a further aspect, amino acid alterations in the above-mentioned method for producing a polypeptide comprising a variant Fc region with enhanced FcγRIIb-binding activity, are: Thr at position 236, Asp at position 268, and Lys at position 330; according to EU numbering. In a further aspect, amino acid alterations in the above-mentioned method for producing a polypeptide comprising a variant Fc region with enhanced FcγRIIb-binding activity, are: Asn at position 236, Asp at position 268, Leu at position 295, Thr at position 326, and Lys at position 330; according to EU numbering. In a further aspect, amino acid alterations in the above-mentioned method for producing a polypeptide comprising a variant Fc region with enhanced FcγRIIb-binding activity, are: Trp at position 235, Asn at position 236, Asp at position 268, Leu at position 295, Thr at position 326, and Lys at position 330; according to EU numbering.

In one aspect, at least one amino acid is altered in the above-mentioned method for producing a polypeptide comprising a variant Fc region with enhanced FcγRIIb-binding activity, of at least one position selected from the group consisting of: 234, 238, 250, 264, 267, 307, and 330 according to EU numbering. In certain embodiments, the FcγRIIb has the sequence of cynomolgous monkey FcγRIIb (SEQ ID NO:223). In certain embodiments, the FcγRIIb has the sequence of human FcγRIIb (e.g., SEQ ID NOs:212, 213, or 214).

[0432] In another aspect, one amino acid is altered in the above-mentioned method for producing a polypeptide comprising a variant Fc region with enhanced FcγRIIb-binding activity, at position 238.

[0433] In another aspect, at least two amino acids are altered in the above-mentioned method for producing a polypeptide comprising a variant Fc region with enhanced FcγRIIb-binding activity, the alterations comprising: (i) one amino acid alteration at position 238, and (ii) at least one amino acid alteration of at least one position selected from the group consisting of: 234, 250, 264, 267, 307, and 330 according to EU numbering. In certain embodiments, the FcγRIIb has the sequence of cynomolgous monkey FcγRIIb (SEQ ID NO:223). In certain embodiments, the FcγRIIb has the sequence of human FcγRIIb (e.g., SEQ ID NOs:212, 213, or 214).

[0434] In another aspect, amino acids are altered in the above-mentioned method for producing a polypeptide comprising a variant Fc region with enhanced FcγRIIb-binding activity, at positions of any one of the following (1)-(9): (1) at positions 234, 238, 250, 307 and 330; (2) at positions 234, 238, 250, 264, 307 and 330; (3) at positions 234, 238, 250, 264, 267, 307 and 330; (4) at positions 234, 238, 250, 267, 307 and 330; (5) at positions 238, 250, 264, 307 and 330; (6) at positions 238, 250, 264, 267, 307 and 330; (7) at positions 238, 250, 267, 307 and 330; (8) at positions 238, 250 and 307; and (9) at positions 238, 250, 307 and 330; according to EU numbering.

[0435] In a further aspect, an amino acid alteration in the above-mentioned method for producing a polypeptide comprising a variant Fc region with enhanced FcγRIIb-binding activity, is selected at each position from the group consisting of: (a) Tyr at position 234; (b) Asp at position 238; (c) Val at position 250; (d) Ile at position 264; (e) Ala at position 267; (f) Pro at position 307; and (g) Lys at position 330; according to EU numbering. In a further aspect, amino acid alterations in the above-mentioned method for producing a polypeptide comprising a variant Fc region with enhanced FcγRIIb-binding activity, are: Asp at position 238; according to EU numbering. In a further aspect, amino acid alterations in the above-mentioned method for producing a polypeptide comprising a variant Fc region with enhanced FcγRIb-binding activity, are: Asp at position 238, Val at position 250, and Pro at position 307; according to EU numbering. In a further aspect, amino acid alterations in the above-mentioned method for producing a polypeptide comprising a variant Fc region with enhanced FcγRIIb-binding activity, are: Asp at position 238, Val at position 250, Pro at position 307, and Lys at position 330; according to EU numbering. In a further aspect, amino acid alterations in the above-mentioned method for producing a polypeptide comprising a variant Fc region with enhanced FcγRIIb-binding activity, are: Asp at position 238, Val at position 250, Ile at position 264, Pro at position 307, and Lys at position 330; according to EU numbering. In a further aspect, amino acid alterations in the above-mentioned method for producing a polypeptide comprising a variant Fc region with enhanced FcγRIIb-binding activity, are: Asp at position 238, Val at position 250, Ala at position 267, Pro at position 307, and Lys at position 330; according to EU numbering. In a further aspect, amino acid alterations in the above-mentioned method for producing a polypeptide comprising a variant Fc region with enhanced FcγRIIb-binding activity, are: Tyr at position 234, Asp at position 238, Val at position 250, Pro at position 307, and Lys at position 330; according to EU numbering. In a further aspect, amino acid alterations in the above-mentioned method for producing a polypeptide comprising a variant Fc region with enhanced FcγRIIb-binding activity, are: Tyr at position 234, Asp at position 238, Val at position 250, Ala at position 267, Pro at position 307, and Lys at position 330; according to EU numbering. In a further aspect, amino acid alterations in the above-mentioned method for producing a polypeptide comprising a variant Fc region with enhanced FcγRIIb-binding activity, are: Asp at position 238, Val at position 250, Ile at position 264, Ala at position 267, Pro at position 307, and Lys at position 330; according to EU numbering. In a further aspect, amino acid alterations in the above-mentioned method for producing a polypeptide comprising a variant Fc region with enhanced FcγRIIb-binding activity, are: Tyr at position 234, Asp at position 238, Val at position 250, Ile at position 264, Pro at position 307, and Lys at position 330; according to EU numbering. In a further aspect, amino acid alterations in the above-mentioned method for producing a polypeptide comprising a variant Fc region with enhanced FcγRIIb-binding activity, are: Tyr at position 234, Asp at position 238, Val at position 250, Ile at position 264, Ala at position 267, Pro at position 307, and Lys at position 330; according to EU numbering. In certain embodiments, the FcγRIIb has the sequence of cynomolgous monkey FcγRIIb (SEQ ID NO:223). In certain embodiments, the FcγRIIb has the sequence of human FcγRIIb (e.g., SEQ ID NOs:212, 213, or 214).

[0436] Furthermore, the present invention provides a method for producing a polypeptide comprising a variant Fc region with increased pI in comparison with a polypeptide comprising a parent Fc region, which comprises introducing at least two amino acid alterations to the parent Fc region.

[0437] In certain embodiments, the production method for producing a polypeptide comprising a variant Fc region provided herein comprises the following steps: (a) preparing a polypeptide comprising a parent Fc region; (b) introducing at least two amino acid alterations to the parent Fc region within the polypeptide; (c) measuring the pI's of the polypeptide comprising the parent Fc region and the polypeptide comprising the Fc region in step (b); and (d) selecting a polypeptide comprising a variant Fc region with increased pI in comparison with the corresponding polypeptide comprising the parent Fe region.

[0438] In one aspect, at least two amino acids are altered in the above-mentioned method for producing a polypeptide comprising a variant Fc region with increased pI, of at least two positions selected from the group consisting of: 285, 311, 312, 315, 318, 333, 335, 337, 341, 342, 343, 384, 385, 388, 390, 399, 400, 401, 402, 413, 420, 422, and 431, according to EU numbering. In a further aspect, the produced polypeptide comprises a variant Fc region with increased pI, of at least two positions selected from the group consisting of: 311, 341, 343, 384, 399, 400, 401, 402, and 413, according to EU numbering.

[0439] In another aspect, amino acids are altered in the above-mentioned method for producing a polypeptide comprising a variant Fc region with increased pI, at positions of any one of the following (1)-(10): (1) at positions 311 and 341; (2) at positions 311 and 343; (3) at positions 311, 343 and 413; (4) at positions 311, 384 and 413; (5) at positions 311 and 399; (6) at positions 311 and 401; (7) at positions 311 and 413; (8) at positions 400 and 413; (9) at positions 401 and 413; and (10) at positions 402 and 413; according to EU numbering. In a further aspect, amino acid alterations in the above-mentioned method for producing a polypeptide comprising a variant Fc region with increased pI, are: Arg at position 400 and Lys at position 413; according to EU numbering. In a further aspect, amino acid alterations in the above-mentioned method for producing a polypeptide comprising a variant Fc region with increased pI, are: Arg at position 311 and Lys at position 413; according to EU numbering. In a further aspect, amino acid alterations in the above-mentioned method for producing a polypeptide comprising a variant Fc region with increased pI, are: Arg at position 311 and Arg at position 399; according to EU numbering. In a further aspect, amino acid alterations in the above-mentioned method for producing a polypeptide comprising a variant Fc region with increased pI, are: Arg at position 311 and Arg at position 343; according to EU numbering. In a further aspect, amino acid alterations in the above-mentioned method for producing a polypeptide comprising a variant Fc region with increased pI, are: Arg at position 311 and Arg at position 413; according to EU numbering. In a further aspect, amino acid alterations in the above-mentioned method for producing a polypeptide comprising a variant Fc region with increased pI, are: Arg at position 311, Arg at position 343, and Arg at position 413; according to EU numbering. In a further aspect, amino acid alterations in the above-mentioned method for producing a polypeptide comprising a variant Fc region with increased pI, are: Arg at position 311, Arg at position 384, and Arg at position 413; according to EU numbering.

[0440] In a further aspect, the amino acid alterations in the above-mentioned method for producing a polypeptide comprising a variant Fc region with increased pI, are selected from Lys or Arg at each position.

[0441] In a further aspect, the amino acid alterations in the above-mentioned production methods are selected from any single alteration, combination of single alterations, or combination alterations described in Tables 14-30.

[0442] Optionally, the following additional steps can be included in the above-mentioned methods for producing a polypeptide comprising a variant Fc region, when the polypeptide further comprises an antigen-binding domain: (e) assessing pharmacokinetic of the antigen in plasma, after administration of the polypeptide comprising the parent Fc region and the polypeptide comprising the variant Fc region in animals such as mice, rats, rabbits, dogs, monkeys, and humans; and (f) selecting a polypeptide comprising a variant Fc region with enhanced ability of antigen elimination from plasma in comparison with the polypeptide comprising the parent Fc region.

[0443] Polypeptides comprising a variant Fc region produced by any of the above-mentioned methods or other methods know in the art are included in the present invention.

[0444] C. Assays

[0445] Anti-myostatin antibodies provided herein may be identified, screened for, or characterized for their physical/chemical properties and/or biological activities by various assays known in the art.

[0446] Variant Fc regions provided herein may be identified, screened for, or characterized for their physical/chemical properties and/or biological activities by various assays described herein or otherwise known in the art.

[0447] 1. Binding Assays and Other Assays

[0448] In one aspect, an antibody of the invention is tested for its antigen binding activity, by known methods such as ELISA, Western blot, BIACORE®, etc. In one aspect, a polypeptide comprising an variant Fc region of the invention is tested for its Fc receptor binding activity, by known methods such as BIACORE®, etc.

[0449] In another aspect, competition assays may be used to identify an antibody that competes for binding to myostatin with any anti-myostatin antibody described herein. In certain embodiments, when such a competing antibody is present in excess, it blocks (e.g., reduces) the binding of a reference antibody to myostatin by at least 10%, 15%, 20%, 25%, 30%, 35%, 40%, 45%, 50%, 55%, 60%, 65%, 70%, 75% or more. In some instances, binding is inhibited by at least 80%, 85%, 90%, 95%, or more. In certain embodiments, such a competing antibody binds to the same epitope (e.g., a linear or a conformational epitope) that is bound by an anti-myostatin antibody described herein (e.g., an anti-myostatin antibody described in Tables 2a, 11a, or 13). In further aspects, the reference antibody has a VH and a VL pair described in Table 2a, 11a, or 13. Detailed exemplary methods for mapping an epitope to which an antibody binds are provided in Morris (1996) “Epitope Mapping Protocols,” in Methods in Molecular Biology vol. 66 (Humana Press, Totowa, N.J.).

[0450] In an exemplary competition assay, immobilized latent myostatin or myostatin propeptide is incubated in a solution comprising a first labeled antibody that binds to the myostatin and a second unlabeled antibody that is being tested for its ability to compete with the first antibody for binding to the myostatin. The second antibody may be present in a hybridoma supernatant. As a control, immobilized myostatin is incubated in a solution comprising the first labeled antibody but not the second unlabeled antibody. After incubation under conditions permissive for binding of the first antibody to the myostatin, excess unbound antibody is removed, and the amount of label associated with immobilized myostatin is measured. If the amount of label associated with immobilized myostatin is substantially reduced in the test sample relative to the control sample, then that indicates that the second antibody is competing with the first antibody for binding to the myostatin. See, Harlow and Lane (1988) Antibodies: A Laboratory Manual ch. 14 (Cold Spring Harbor Laboratory, Cold Spring Harbor, N.Y.).

[0451] In another exemplary competition assay, BIACORE® analysis is used to determine the ability of a test anti-myostatin antibody to compete with the binding to myostatin by a second (reference) anti-myostatin antibody. In a further aspect in which a BIACORE® instrument (for example, the BIACORE® 3000) is operated according to the manufacturer's recommendations, myostatin protein (e.g, latent myostatin or myostatin propeptide) is captured on a CM5 BIACORE® chip using a standard technique known in the art to generate a myostatin-coated surface. Typically 200-800 resonance units of myostatin would be coupled to the chip (an amount that gives easily measurable levels of binding but that is readily saturable by the concentrations of test antibody being used). The two antibodies (i.e., the test and reference antibody) to be assessed for their ability to compete with each other are mixed at a 1:1 molar ratio of binding sites in a suitable buffer to create a test mixture. When calculating the concentrations on a binding site basis the molecular weight of a test or reference antibody is assumed to be the total molecular weight of the corresponding antibody divided by the number of myostatin-binding sites on the antibody. The concentration of each antibody (i.e., test and reference antibody) in the test mixture should be high enough to readily saturate the binding sites for that antibody on the myostatin molecules captured on the BIACORE® chip. The test and reference antibodies in the mixture are at the same molar concentration (on a binding basis), typically between 1.00 and 1.5 micromolar (on a binding site basis). Separate solutions containing the test antibody alone and the reference antibody alone are also prepared. Test antibody and reference antibody in these solutions should be in the same buffer and at the same concentration and conditions as in the test mixture. The test mixture containing the test antibody and reference antibody is passed over the myostatin-coated BIACORE® chip and the total amount of binding is recorded. The chip is then treated in such a way as to remove the bound test or reference antibody without damaging the chip-bound myostatin. Typically, this is done by treating the chip with 30 mM HCl for 60 seconds. The solution of test antibody alone is then passed over the myostatin-coated surface and the amount of binding recorded. The chip is again treated to remove all of the bound antibody without damaging the chip-bound myostatin. The solution of reference antibody alone is then passed over the myostatin-coated surface and the amount of binding recorded. The maximum theoretical binding of the mixture of test antibody and reference antibody is next calculated, and is the sum of the binding of each antibody (i.e. test and reference) when passed over the myostatin surface alone. If the actual recorded binding of the mixture is less than this theoretical maximum then test antibody and reference antibody are competing with each other for binding myostatin. Thus, in general, a competing test anti-myostatin antibody is one which will bind to myostatin in the above BIACORE® blocking assay such that during the assay and in the presence of the reference anti-myostatin antibody the recorded binding is between 80% and 0.1% (e.g., 80%> to 4%) of the maximum theoretical binding, specifically between 75% and 0.1% (e.g., 75% to 4%) of the maximum theoretical binding, and more specifically between 70% and 0.1% (e.g., 70% to 4%) of maximum theoretical binding (as defined above) of the test antibody and reference antibody in combination.

[0452] Assays for determining the binding activity of a polypeptide containing a variant Fc region towards one or more FcγR family members are described herein or otherwise known in the art. Such binding assays include but are not limited to BIACORE® analysis, which utilizes the surface plasmon resonance (SPR) phenomena, Amplified Luminescent Proximity Homogeneous Assay (ALPHA) screening, ELISA, and fluorescence activated cell sorting (FACS) (Lazar et al., Proc. Natl. Acad. Sci. USA (2006) 103(11): 4005-4010).

[0453] In one embodiment, BIACORE® analysis can be used to evaluate whether the binding activity of a polypeptide comprising a variant Fc region is enhanced, or maintained or decreased with respect to a particular FcγR family member. For example, by observing whether there is a decrease or an increase in the dissociation constant (KD) value obtained from sensorgram analysis, where various FcγRs are subjected to interaction as an analyte with polypeptides comprising a variant Fc region immobilized or captured onto the sensor chip using known methods and reagents such as Protein A, Protein L, Protein A/G, Protein G, anti-lamda chain antibodies, anti-kappa chain antibodies, antigenic peptides, antigenic proteins). Alterations in binding activity can also be determined by comparing changes in the resonance unit (RU) value on the sensorgram before and after the one or more types of FcγRs are subjected to interaction as analytes with the captured polypeptides comprising the variant Fc region. Alternatively, FcγR can be immobilized or captured onto the sensor chips, and the polypeptides comprising the variant Fc region are used as an analyte.

[0454] In BIACORE® analysis, one of the substances (the ligand) in observation of an interaction is immobilized onto a gold thin film on a sensor chip, and by shining light from the reverse side of the sensor chip so that total reflection takes place at the interface between the gold thin film and glass, a portion of reduced reflection intensity is formed in part of the reflected light (SPR signal). When the other one of the substances (the analyte) in observation of an interaction is made to flow on the sensor chip surface and the ligand binds to the analyte, the mass of the immobilized ligand molecule increases and the refractive index of the solvent on the sensor chip surface changes. The position of the SPR signal shifts as a result of this change in refractive index (on the other hand, the signal position returns when this binding dissociates). The BIACORE® system indicates the amount of shift mentioned above, or more specifically the time variable of mass by plotting the change in mass on the sensor chip surface on the ordinate as the measurement data (sensorgram). The amount of analyte bound to the ligand trapped on the sensor chip surface is determined from the sensorgram. Kinetic parameters such as association rate constants (ka) and dissociation rate constants (kd) are determined from the curves of the sensorgram, and the dissociation constants (KD) are determined from the ratio of these constants. In the BIACORE® method, a method for measuring inhibition is preferably used. An example of the method for measuring inhibition is described in Lazar et al., Proc. Natl. Acad. Sci. USA 103(11):4005-4010 (2006).

[0455] ALPHA screening is performed by ALPHA technology which uses two beads, a donor and an acceptor, based on the following principles. Luminescent signals are detected only when molecules bound to donor beads physically interact with molecules bound to the acceptor beads, and the two beads are in close proximity to each other. Laser-excited photosensitizer in the donor beads converts ambient oxygen to excited-state singlet oxygen. Singlet oxygen is dispersed around the donor beads, and when it reaches the adjacent acceptor beads, chemiluminescent reaction is induced in the beads, and light is ultimately emitted. When the molecules bound to the donor beads do not interact with the molecules bound to the acceptor beads, the chemiluminescent reaction does not take place because singlet oxygen produced by the donor beads does not reach the acceptor beads.

[0456] For example, a biotinylated polypeptide complex is bound to the donor beads, and Fcγ receptor tagged with glutathione S transferase (GST) is linked to the acceptor beads. In the absence of a competing polypeptide complex comprising a variant Fc region, the polypeptide complex comprising a parent Fc region interacts with the Fcγ receptor and produces 520-620 nm signals. The polypeptide complex comprising an untagged variant Fc region competes with the polypeptide complex comprising a parent Fc region for interaction with the Fcγ receptor. Relative binding activities can be determined by quantifying the decrease in fluorescence observed as a result of the competition. Biotinylation of polypeptide complexes such as antibodies using Sulfo-NHS-biotin and such is well known. The method of expressing the Fcγ receptor and GST in a cell carrying a fusion gene produced by fusing a polynucleotide encoding the Fcγ receptor in frame with a polynucleotide encoding GST in an expressible vector, and performing purification using a glutathione column is appropriately adopted as a method for tagging an Fcγ receptor with GST. The obtained signals are preferably analyzed, for example, by fitting them to a one-site competition model which uses a non-linear regression analysis using software such as GRAPHPAD PRISM (GraphPad, San Diego).

[0457] A variant Fc region with decreased FcγR-binding activity refers to an Fc region which binds to FcγR with essentially weaker binding activity than a parent Fc region when assays are performed using substantially the same amount of a corresponding parent Fc region and a variant Fc region. Furthermore, a variant Fc region with enhanced FcγR-binding activity refers to an Fc region which binds to FcγR with essentially stronger binding activity than a corresponding parent Fc region when assays are performed using substantially the same amount of a parent Fc region and a variant Fc region. A variant Fc region with maintained FcγR-binding activity refers to an Fc region that binds to FcγR with binding activity equivalent to or essentially not different from that of a parent Fc region when assays are performed using substantially the same amount of the corresponding parent Fc region and the polypeptide containing the variant Fc region.

[0458] Whether or not the binding activities of an Fc region towards various FcγRs were enhanced or decreased can be determined from the increase or decrease in the amount of binding of the various FcγRs to the Fc region, which were determined according to the above-mentioned measurement method. Here, the amount of binding of the various FcγRs to the Fc region can be evaluated as a value obtained by dividing the difference in the RU values of sensorgrams that changed before and after interaction of various FcγRs as the analyte with the Fc region, by the difference in the RU values of sensorgrams that changed before and after capturing the Fc regions to the sensor chips.

[0459] In the present invention, enhanced FcγRIIb-binding activity preferably means, for example, that the ratio of [KD value of a parent Fc region for FcγRIIb]/[KD value of a variant Fc region for FcγRIIb] in the KD values measured by the above-mentioned measurement method preferably becomes 2.0 or greater, 3.0 or greater, 4.0 or greater, 5.0 or greater, 6.0 or greater, 7.0 or greater, 8.0 or greater, 9.0 or greater, 10 or greater, 15 or greater, 20 or greater, 25 or greater, 30 or greater, 35 or greater, 40 or greater, 45 or greater, or even 50 or greater, 55 or greater, 60 or greater, 65 or greater, 70 or greater, 75 or greater, 80 or greater, 85 or greater, 90 or greater, 95 or greater, or 100 or greater.

[0460] The KD value (mol/L) of a variant Fc region described herein for FcγRIIb is preferably less than that of a parent Fc region for FcγRIIb, and may be, for example, 2.0×10⁻⁶ M or smaller, 1.0×10⁻⁶ M or smaller, 9.0×10⁻⁷ M or smaller, 8.0×10⁻⁷ M or smaller, 7.0×10⁻⁷ M or smaller, 6.0×10⁻⁷ M or smaller, 5.0×10⁻⁷ M or smaller, 4.0×10⁻⁷ M or smaller, 3.0×10⁻⁷ M or smaller, 2.0×10⁻⁷ M or smaller, 1.0×10⁻⁷ M or smaller, 9.0×10⁻⁸ M or smaller, 8.0×10⁻⁸ M or smaller, 7.0×10⁻⁸ M or smaller, 6.0×10⁻⁸ M or smaller, 5.0×10⁻⁸ M or smaller.

[0461] Furthermore, a variant Fc region with enhanced binding selectivity to FcγRIIb compared to FcγRIIa refers to an Fc region where: (a) FcγRIIb-binding activity is enhanced, and FcγRIIa-binding activity is maintained or decreased; (b) FcγRIIb-binding activity is enhanced and FcγRIIa-binding activity is also enhanced, but the degree of enhancement of FcγRIIa-binding activity is lower than the degree of enhancement of FcγRIIb-binding activity; or (c) FcγRIIb-binding activity is decreased and FcγRIIa-binding activity is also decreased, but the degree of decrease of FcγRIIb-binding activity is less than the degree of decrease of FcγRIIa-binding activity. Whether or not a variant Fc region has improved binding selectivity for FcγRIIb rather than for FcγRIIa can be determined, for example, by comparing the ratio of the KD value for FcγRIIa to the KD value for FcγRIIb of the variant Fc region (the ratio of [KD value of the variant Fc region for FcγRIIa]/[KD value of the variant Fc region for FcγRIIb]), with the ratio of the KD value for FcγRIIa to the KD value for FcγRIIb of the parent Fc region (the ratio of [KD value of the parent Fc region for FcγRIIa]/[KD value of the parent Fc region for FcγRIIb]), which were determined according to the above-mentioned examples. Specifically, when the KD ratio for the variant Fc region is greater than that of the parent Fc region, the variant Fc region can be determined to have an improved binding selectivity for FcγRIIb rather than for FcγRIIa in comparison with the parent Fc region. Especially in human, the FcγRIIb-binding activity is likely to correlate with binding activity to FcγRIIa (type R) than to FcγRIIa (type H) since the amino acid sequence of FcγRIIb shares higher identity with FcγRIIa (type R) than FcγRIIa (type H). Therefore, finding amino acid alteration(s) that can enhance binding selectivity to human FcγRIIb compared to human FcγRIIa (type R) is important for enhancing binding selectivity to FcγRIIb compared to FcγRIIa in humans.

[0462] When a variant Fc region of the present invention has higher binding activity against FcγRIIb and lower binding activity against FcγRIII (such as FcγRIIIa or FcγRIIIb) compared to those of a parent Fc region, the variant Fc region can be said to be FcγRIIb-specific.

[0463] 2. Activity Assays

[0464] In one aspect, assays are provided for identifying anti-myostatin antibodies having biological activity. Biological activity may include, e.g., inhibiting the activation of myostatin, blocking the release of mature myostatin from latent myostatin, inhibiting the proteolytic cleavage of latent myostatin, blocking the access of a protease to latent myostatin, etc. Antibodies having such biological activity in vivo and/or in vitro are also provided. In certain embodiments, an antibody of the invention is tested for such biological activity.

[0465] In certain embodiments, whether a test antibody inhibits the cleavage of latent myostatin is determined by detecting the cleavage product of latent myostatin (myostatin) using a method known in the art such as electrophoresis, chromatography, immunoblot analysis, an enzyme-linked immunosorbent assay (ELISA), or mass spectrometry, after a protease that can cleave latent myostatin is contacted with the latent myostatin in the presence or absence of the test antibody (see, for example, Thies et al., Growth Factors 18(4):251-259 (2001)). Where a decreased amount of the cleavage product of latent myostatin (e.g., human myostatin propeptide) is detected in the presence of (or following contact with) the test antibody, the test antibody is identified as an antibody that can inhibit the cleavage of latent myostatin. In certain embodiments, whether a test antibody blocks access of a protease to latent myostatin is determined by methods for the detection of protein interactions between the protease and latent myostatin, e.g., ELISAs or BIACORE®. Where a decreased interaction between the protease and latent myostatin is detected in the presence of (or following contact with) the test antibody, the test antibody is identified as an antibody that can block access of the protease to latent myostatin.

[0466] In certain embodiments, whether a test antibody blocks the release of mature myostatin from latent myostatin is determined by detecting mature myostatin activity, for example, the activity of binding to a myostatin receptor, or the activity of mediating signal transduction in a cell expressing a myostatin receptor (e.g., ActRIIb). Cells useful for such an assay can be those that express an endogenous myostatin receptor, for example, L6 myocytes, or can be those that are genetically modified, transiently or stably, to express a transgene encoding a myostatin receptor, for example, an activin receptor such as an activin type II receptor (Thies et al, Supra). Binding of myostatin to a myostatin receptor can be detected using a receptor binding assay. Myostatin mediated signal transduction can be detected at any level in the signal transduction pathway, for example, by examining phosphorylation of a Smad polypeptide, examining expression of a myostatin regulated gene including a reporter gene, or measuring proliferation of a myostatin-dependent cell. Where a decreased mature myostatin activity is detected in the presence of (or following contact with) the test antibody, the test antibody is identified as an antibody that can block the release of mature myostatin from latent myostatin.

[0467] Inhibition of myostatin activation can also be detected and/or measured using the methods set forth and exemplified in the working examples. Using assays of these or other suitable types, test antibodies can be screened for those capable of inhibiting the activation of myostatin. In certain embodiments, inhibition of myostatin activation includes at least a 5%, 10%, 15%, 20%, 25%, 30%, 35%, or 40% or greater decrease in myostatin activation in the assay as compared to a negative control under similar conditions. In some embodiments, it refers to the inhibition of myostatin activation of at least 45%, 50%, 55%, 60%, 65%, 70%, 75%, 80%, 85%, 90%, or 95% or greater.

[0468] In another aspect, assays for identifying anti-myostatin antibodies that form an immune complex (i.e., an antigen-antibody complex) with myostatin are provided. Antibodies having such biological activity in vivo and/or in vitro are also provided.

[0469] In certain embodiments, an antibody of the invention is tested for such biological activity.

[0470] In certain embodiments, the formation of an immune complex is evaluated by a method such as size exclusion (gel filtration) chromatography, ultracentrifugation, light scattering, electron microscope, or mass spectrometry (Mol. Immunol. 39:77-84 (2002), Mol. Immunol. 47:357-364 (2009)). These methods make use of the property that an immune complex is a larger molecule than an antibody alone, or an antigen alone. Where a large complex containing two or more antibodies and two or more antigens (e.g., myostatin molecules) is detected in the presence of a test antibody and an antigen, the test antibody is identified as an antibody that can form an immune complex containing two or more antibodies and two or more molecules of myostatin. In another embodiment, formation of an immune complex is evaluated by a method such as, ELISA, FACS, or SPR (surface plasmon resonance assay; for example, using BIACORE®) (Shields et al., J Biol. Chem. 276(9):6591-6604 (2001); Singh et al., J. Immunol. Methods 50:109-114 (1982); Suzuki et al., J. Immunol. 184(4): 1968-1976 (2010); Luo et al., mAbs 1(5):491-504 (2009)). These methods make use of the property that an immune complex containing two or more antibodies and two or more antigens can bind more strongly to an Fc receptor or a complement component than an antibody or antigen alone can. Where an increased binding to an Fc receptor or a complement component is detected in the presence of both a test antibody and an antigen compared to in the presence of an antibody alone, the test antibody is identified as an antibody that can form an immune complex containing two or more antibodies and two or more molecules of myostatin. In another embodiment, formation of an immune complex is evaluated by administering a test antibody to an animal (e.g., a mouse) and measuring the clearance of antigen from plasma. As described above, an antibody which forms an immune complex containing two or more antibodies with two or more antigens is expected to accelerate the elimination of antigens from plasma. Therefore, where an accelerated elimination of myostatin from plasma is observed in a test antibody-administered mouse compared to in a reference antibody-administered mouse, the test antibody is identified as an antibody that can form an immune complex containing two or more antibodies and two or more molecules of myostatin more efficiently than the reference antibody.

[0471] D. Immunoconjugates

[0472] In some embodiments, the invention provides immunoconjugates comprising an anti-myostatin antibody herein conjugated to one or more cytotoxic agents, such as chemotherapeutic agents or drugs, growth inhibitory agents, toxins (e.g., protein toxins, enzymatically active toxins of bacterial, fungal, plant, or animal origin, or fragments thereof), or radioactive isotopes.

[0473] In some embodiments, the invention provides immunoconjugates comprising a polypeptide comprising a variant Fc region herein conjugated to one or more cytotoxic agents, such as chemotherapeutic agents or drugs, growth inhibitory agents, toxins (e.g., protein toxins, enzymatically active toxins of bacterial, fungal, plant, or animal origin, or fragments thereof), or radioactive isotopes.

[0474] In one embodiment, an immunoconjugate is an antibody-drug conjugate (ADC) in which an antibody is conjugated to one or more drugs, including but not limited to a maytansinoid (see U.S. Pat. Nos. 5,208,020, 5,416,064 and EP Patent EP 0 425 235 B1); an auristatin such as monomethylauristatin drug moieties DE and DF (MMAE and MMAF) (see U.S. Pat. Nos. 5,635,483 and 5,780,588, and U.S. Pat. No. 7,498,298); a dolastatin; a calicheamicin or derivative thereof (see U.S. Pat. Nos. 5,712,374, 5,714,586, 5,739,116, 5,767,285, 5,770,701, 5,770,710, 5,773,001, and 5,877,296; Hinman et al., Cancer Res. 53:3336-3342 (1993); and Lode et al., Cancer Res. 58:2925-2928 (1998)); an anthracycline such as daunomycin or doxorubicin (see Kratz et al., Current Med. Chem. 13:477-523 (2006); Jeffrey et al., Bioorganic & Med. Chem. Letters 16:358-362 (2006); Torgov et al., Bioconj. Chem. 16:717-721 (2005); Nagy et al., Proc. Natl. Acad. Sci. USA 97:829-834 (2000); Dubowchik et al., Bioorg. & Med. Chem. Letters 12:1529-1532 (2002); King et al., J. Med. Chem. 45:4336-4343 (2002); and U.S. Pat. No. 6,630,579); methotrexate; vindesine; a taxane such as docetaxel, paclitaxel, larotaxel, tesetaxel, and ortataxel; a trichothecene; and CC 1065.

[0475] In another embodiment, an immunoconjugate comprises an antibody as described herein conjugated to an enzymatically active toxin or fragment thereof, including but not limited to diphtheria A chain, nonbinding active fragments of diphtheria toxin, exotoxin A chain (from Pseudomonas aeruginosa), ricin A chain, abrin A chain, modeccin A chain, alpha-sarcin, Aleurites fordii proteins, dianthin proteins, Phytolaca americana proteins (PAPI, PAPII, and PAP-S), momordica charantia inhibitor, curcin, crotin, sapaonaria officinalis inhibitor, gelonin, mitogellin, restrictocin, phenomycin, enomycin, and a tricothecene.

[0476] In another embodiment, an immunoconjugate comprises an antibody as described herein conjugated to a radioactive atom to form a radioconjugate. A variety of radioactive isotopes are available for the production of radioconjugates. Examples include At²¹¹, I¹³¹, I¹²⁵, Y⁹⁰, Re¹⁸⁶, Re¹⁸⁸, Sm¹⁵³, Bi²¹², P³², Pb²¹² and radioactive isotopes of Lu. When the radioconjugate is used for detection, it may comprise a radioactive atom for scintigraphic studies, for example tc99m or I123, or a spin label for nuclear magnetic resonance (NMR) imaging (also known as magnetic resonance imaging, mri), such as iodine-123 again, iodine-131, indium-111, fluorine-19, carbon-13, nitrogen-15, oxygen-17, gadolinium, manganese and iron.

[0477] Conjugates of an antibody and cytotoxic agent may be made using a variety of bifunctional protein coupling agents such as N-succinimidyl-3-(2-pyridyldithio) propionate (SPDP), succinimidyl-4-(N-maleimidomethyl) cyclohexane-1-carboxylate (SMCC), iminothiolane (IT), bifunctional derivatives of imidoesters (such as dimethyl adipimidate HCl), active esters (such as disuccinimidyl suberate), aldehydes (such as glutaraldehyde), bis-azido compounds (such as bis (p-azidobenzoyl) hexanediamine), bis-diazonium derivatives (such as bis-(p-diazoniumbenzoyl)-ethylenediamine), diisocyanates (such as toluene 2,6-diisocyanate), and bis-active fluorine compounds (such as 1,5-difluoro-2,4-dinitrobenzene). For example, a ricin immunotoxin can be prepared as described in Vitetta et al., Science 238:1098 (1987). Carbon-14-labeled 1-isothiocyanatobenzyl-3-methyldiethylene triaminepentaacetic acid (MX-DTPA) is an exemplary chelating agent for conjugation of radionucleotide to the antibody. See WO 1994/11026. The linker may be a “cleavable linker” facilitating release of a cytotoxic drug in the cell. For example, an acid-labile linker, peptidase-sensitive linker, photolabile linker, dimethyl linker or disulfide-containing linker (Chari et al., Cancer Res. 52:127-131 (1992); U.S. Pat. No. 5,208,020) may be used.

[0478] The immunoconjugates or ADCs herein expressly contemplate, but are not limited to such conjugates prepared with cross-linker reagents including, but not limited to, BMPS, EMCS, GMBS, HBVS, LC-SMCC, MBS, MPBH, SBAP, SIA, SIAB, SMCC, SMPB, SMPH, sulfo-EMCS, sulfo-GMBS, sulfo-KMUS, sulfo-MBS, sulfo-SIAB, sulfo-SMCC, and sulfo-SMPB, and SVSB (succinimidyl-(4-vinylsulfone)benzoate) which are commercially available (e.g., from Pierce Biotechnology, Inc., Rockford, Ill., U.S.A).

[0479] E. Methods and Compositions for Diagnostics and Detection

[0480] In certain embodiments, any of the anti-myostatin antibodies provided herein is useful for detecting the presence of myostatin in a biological sample. The term “detecting” as used herein encompasses quantitative or qualitative detection. In certain embodiments, a biological sample comprises a cell or tissue, such as serum, whole blood, plasma, biopsy sample, tissue sample, cell suspension, saliva, sputum, oral fluid, cerebrospinal fluid, amniotic fluid, ascites fluid, milk, colostrum, mammary gland secretion, lymph, urine, sweat, lacrimal fluid, gastric fluid, synovial fluid, peritoneal fluid, ocular lens fluid or mucus. In particular embodiments, the biological sample comprises whole blood. In additional embodiments, the biological sample comprises serum or plasma.

[0481] In one embodiment, an anti-myostatin antibody for use in a method of diagnosis or detection is provided. In a further aspect, a method of detecting the presence of latent myostatin or myostatin propeptide in a biological sample is provided. In certain embodiments, the method comprises contacting the biological sample with an anti-myostatin antibody as described herein under conditions permissive for binding of the anti-myostatin antibody to myostatin, and detecting whether a complex is formed between the anti-myostatin antibody and myostatin. Such method may be an in vitro or in vivo method. In one embodiment, an anti-myostatin antibody is used to select subjects eligible for therapy with an anti-myostatin antibody, e.g., where myostatin (e.g, latent myostatin) is a biomarker for selection of patients.

[0482] Exemplary disorders that may be diagnosed using an antibody of the invention include but are not limited to, muscular dystrophy (MD; including Duchenne muscular dystrophy), amyotrophic lateral sclerosis (ALS), muscle atrophy, organ atrophy, carpal tunnel syndrome, frailty, congestive obstructive pulmonary disease (COPD), sarcopenia, cachexia, muscle wasting syndromes, HIV-induced muscle wasting, type 2 diabetes, impaired glucose tolerance, metabolic syndrome (including syndrome X), insulin resistance (including resistance induced by trauma, e.g., burns or nitrogen imbalance), adipose tissue disorders (e.g., obesity, dyslipidemia, nonalcoholic fatty liver disease, etc.), osteoporosis, osteopenia, osteoarthritis, and metabolic bone disorders (including low bone mass, premature gonadal failure, androgen suppression, vitamin D deficiency, secondary hyperparathyroidism, nutritional deficiencies, and anorexia nervosa).

[0483] In certain embodiments, labeled anti-myostatin antibodies are provided. Labels include, but are not limited to, labels or moieties that are detected directly (such as fluorescent, chromophoric, electron-dense, chemiluminescent, and radioactive labels), as well as moieties, such as enzymes or ligands, that are detected indirectly, e.g., through an enzymatic reaction or molecular interaction. Exemplary labels include, but are not limited to, the radioisotopes ³²P, ¹⁴C, ¹²⁵I, ³H, and ¹³¹I, fluorophores such as rare earth chelates or fluorescein and its derivatives, rhodamine and its derivatives, dansyl, umbelliferone, luceriferases, e.g., firefly luciferase and bacterial luciferase (U.S. Pat. No. 4,737,456), luciferin, 2,3-dihydrophthalazinediones, horseradish peroxidase (HRP), alkaline phosphatase, β-galactosidase, glucoamylase, lysozyme, saccharide oxidases, e.g., glucose oxidase, galactose oxidase, and glucose-6-phosphate dehydrogenase, heterocyclic oxidases such as uricase and xanthine oxidase, coupled with an enzyme that employs hydrogen peroxide to oxidize a dye precursor such as HRP, lactoperoxidase, or microperoxidase, biotin/avidin, spin labels, bacteriophage labels, stable free radicals, and the like.

[0484] F. Pharmaceutical Formulations

[0485] Pharmaceutical formulations of an anti-myostatin antibody as described herein are prepared by mixing such antibody having the desired degree of purity with one or more optional pharmaceutically acceptable carriers (Remington's Pharmaceutical Sciences 16th edition, Osol, A. Ed. (1980)), in the form of lyophilized formulations or aqueous solutions.

[0486] Pharmaceutical formulations of a polypeptide comprising a variant Fc region as described herein are prepared by mixing such polypeptide having the desired degree of purity with one or more optional pharmaceutically acceptable carriers in the form of lyophilized formulations or aqueous solutions.

[0487] Pharmaceutically acceptable carriers are generally nontoxic to recipients at the dosages and concentrations employed, and include, but are not limited to: buffers such as phosphate, citrate, and other organic acids; antioxidants including ascorbic acid and methionine; preservatives (such as octadecyldimethylbenzyl ammonium chloride; hexamethonium chloride; benzalkonium chloride; benzethonium chloride; phenol, butyl or benzyl alcohol; alkyl parabens such as methyl or propyl paraben; catechol; resorcinol; cyclohexanol; 3-pentanol; and m-cresol); low molecular weight (less than about 10 residues) polypeptides; proteins, such as serum albumin, gelatin, or immunoglobulins; hydrophilic polymers such as polyvinylpyrrolidone; amino acids such as glycine, glutamine, asparagine, histidine, arginine, or lysine; monosaccharides, disaccharides, and other carbohydrates including glucose, mannose, or dextrins; chelating agents such as EDTA; sugars such as sucrose, mannitol, trehalose or sorbitol; salt-forming counter-ions such as sodium; metal complexes (e.g., Zn-protein complexes); and/or non-ionic surfactants such as polyethylene glycol (PEG). Exemplary pharmaceutically acceptable carriers herein further include insterstitial drug dispersion agents such as soluble neutral-active hyaluronidase glycoproteins (sHASEGP), for example, human soluble PH-20 hyaluronidase glycoproteins, such as rHuPH20 (HYLENEX®, Baxter International, Inc.). Certain exemplary sHASEGPs and methods of use, including rHuPH20, are described in US Publ. Nos. 2005/0260186 and 2006/0104968. In one aspect, a sHASEGP is combined with one or more additional glycosaminoglycanases such as chondroitinases.

[0488] Exemplary lyophilized antibody formulations are described in U.S. Pat. No. 6,267,958. Aqueous antibody formulations include those described in U.S. Pat. No. 6,171,586 and WO 2006/044908, the latter formulations including a histidine-acetate buffer.

[0489] The formulation herein may also contain more than one active ingredients as necessary for the particular indication being treated, preferably those with complementary activities that do not adversely affect each other. Such active ingredients are suitably present in combination in amounts that are effective for the purpose intended.

[0490] Active ingredients may be entrapped in microcapsules prepared, for example, by coacervation techniques or by interfacial polymerization, for example, hydroxymethylcellulose or gelatin-microcapsules and poly-(methylmethacylate) microcapsules, respectively, in colloidal drug delivery systems (for example, liposomes, albumin microspheres, microemulsions, nano-particles and nanocapsules) or in macroemulsions. Such techniques are disclosed in Remington's Pharmaceutical Sciences 16th edition, Osol, A. Ed. (1980).

[0491] Sustained-release preparations may be prepared. Suitable examples of sustained-release preparations include semipermeable matrices of solid hydrophobic polymers containing the antibody, which matrices are in the form of shaped articles, e.g., films, or microcapsules.

[0492] The formulations to be used for in vivo administration are generally sterile. Sterility may be readily accomplished, e.g., by filtration through sterile filtration membranes.

[0493] G. Therapeutic Methods and Compositions

[0494] Any of the anti-myostatin antibodies provided herein may be used in therapeutic methods. Likewise, any of the polypeptides comprising an variant Fc region provided herein may be used in therapeutic methods.

[0495] In one aspect, an anti-myostatin antibody for use as a medicament is provided. In further aspects, an anti-myostatin antibody for use in treating a muscle wasting disease is provided. In certain embodiments, an anti-myostatin antibody for use in a method of treatment is provided. In certain embodiments, the invention provides an anti-myostatin antibody for use in a method of treating an individual having a muscle wasting disease comprising administering to the individual an effective amount of the anti-myostatin antibody. In one embodiment, the method further comprises administering to the individual an effective amount of at least one additional therapeutic agent. In further embodiments, the invention provides an anti-myostatin antibody for use in increasing mass of muscle tissue. In certain embodiments, the invention provides an anti-myostatin antibody for use in a method of increasing mass of muscle tissue in an individual comprising administering to the individual an effective amount of the anti-myostatin antibody to increase mass of muscle tissue. In further embodiments, the invention provides an anti-myostatin antibody for use in increasing strength of muscle tissue. In certain embodiments, the invention provides an anti-myostatin antibody for use in a method of increasing strength of muscle tissue in an individual comprising administering to the individual an effective amount of the anti-myostatin antibody to increase strength of muscle tissue. In further embodiments, the invention provides an anti-myostatin antibody for use in reducing body fat accumulation. In certain embodiments, the invention provides an anti-myostatin antibody for use in a method of reducing body fat accumulation in an individual comprising administering to the individual an effective amount of the anti-myostatin antibody to reduce body fat accumulation. An “individual” according to any of the above embodiments is preferably a human.

[0496] An anti-myostatin antibody of the present invention may exhibit pH-dependent binding characteristics. In further embodiments, the invention provides an anti-myostatin antibody for use in enhancing the clearance of myostatin from plasma. In certain embodiments, the invention provides an anti-myostatin antibody for use in a method of enhancing the clearance of myostatin from plasma in an individual comprising administering to the individual an effective amount of the anti-myostatin antibody to enhance the clearance of myostatin from plasma. In one embodiment, an anti-myostatin antibody with pH-dependent binding characteristics enhances the clearance of myostatin from plasma, compared to a conventional anti-myostatin antibody which does not have pH-dependent binding characteristics. In a further embodiment, an anti-myostatin antibody with a pH-dependent binding characteristic between binding at pH5.8 and pH7.4 enhances the clearance of myostatin from plasma, compared to a conventional anti-myostatin antibody which does not have pH-dependent binding characteristics. An “individual” according to any of the above embodiments is preferably a human.

[0497] In a further aspect, the invention provides the use of an anti-myostatin antibody in the manufacture or preparation of a medicament. In one embodiment, the medicament is for treatment of a muscle wasting disease. In a further embodiment, the medicament is for use in a method of treating a muscle wasting disease comprising administering to an individual having a muscle wasting disease an effective amount of the medicament. In one embodiment, the method further comprises administering to the individual an effective amount of at least one additional therapeutic agent. In a further embodiment, the medicament is for increasing mass of muscle tissue. In a further embodiment, the medicament is for use in a method of increasing mass of muscle tissue in an individual comprising administering to the individual an effective amount of the medicament to increase mass of muscle tissue. In a further embodiment, the medicament is for increasing strength of muscle tissue. In a further embodiment, the medicament is for use in a method of increasing strength of muscle tissue in an individual comprising administering to the individual an effective amount of the medicament to increase strength of muscle tissue. In a further embodiment, the medicament is for reducing body fat accumulation. In a further embodiment, the medicament is for use in a method of reducing body fat accumulation in an individual comprising administering to the individual an effective amount of the medicament to reduce body fat accumulation. An “individual” according to any of the above embodiments may be a human.

[0498] An anti-myostatin antibody of the present invention may exhibit pH-dependent binding characteristics. In a further embodiment, the medicament is for enhancing the clearance of myostatin from plasma. In a further embodiment, the medicament is for use in a method of enhancing the clearance of myostatin from plasma in an individual comprising administering to the individual an effective amount of the medicament to enhance the clearance of myostatin from plasma. In one embodiment, an anti-myostatin antibody with pH-dependent binding characteristics enhances the clearance of myostatin from plasma, compared to a conventional anti-myostatin antibody which does not have pH-dependent binding characteristics. In a further embodiment, the anti-myostatin antibody exhibits different pH-dependent binding characteristics between pH5.8 and pH7.4. An “individual” according to any of the above embodiments is preferably a human.

[0499] In another aspect, the invention provides a method for treating a muscle wasting disease. In one embodiment, the method comprises administering to an individual having such a muscle wasting disease an effective amount of an anti-myostatin antibody provided herein. In one embodiment, the method further comprises administering to the individual an effective amount of at least one additional therapeutic agent. The “individual” according to any of the above embodiments may be a human.

[0500] In another aspect, the invention provides a method for increasing mass of muscle tissue in an individual. In one embodiment, the method comprises administering to the individual an effective amount of an anti-myostatin antibody provided herein to increase mass of muscle tissue. In one embodiment, the “individual” is a human.

[0501] In another aspect, the invention provides a method for increasing strength of muscle tissue in an individual. In one embodiment, the method comprises administering to the individual an effective amount of an anti-myostatin antibody provided herein to increase strength of muscle tissue. In one embodiment, the “individual” is a human.

[0502] In another aspect, the invention provides a method for reducing body fat accumulation in an individual. In one embodiment, the method comprises administering to the individual an effective amount of an anti-myostatin antibody provided herein to reduce body fat accumulation. In one embodiment, the “individual” is a human.

[0503] An anti-myostatin antibody of the present invention may exhibit pH-dependent binding characteristics. In a further embodiment, the invention provides a method for enhancing the clearance of myostatin from plasma in an individual. In one embodiment, the method comprises administering to the individual an effective amount of an anti-myostatin antibody provided herein to enhance the clearance of myostatin from plasma. In one embodiment, an anti-myostatin antibody with pH-dependent binding characteristics enhances the clearance of myostatin from plasma, compared to a conventional anti-myostatin antibody which does not have pH-dependent binding characteristics. In a further embodiment, the anti-myostatin antibody exhibits different pH-dependent binding characteristics between pH5.8 and pH7.4. In one embodiment, an “individual” is a human.

[0504] In a further aspect, the invention provides pharmaceutical formulations comprising any of the anti-myostatin antibodies provided herein, e.g., for use in any of the above therapeutic methods. In one embodiment, a pharmaceutical formulation comprises any of the anti-myostatin antibodies provided herein and a pharmaceutically acceptable carrier. In another embodiment, a pharmaceutical formulation comprises any of the anti-myostatin antibodies provided herein and at least one additional therapeutic agent.

[0505] In a further aspect, the pharmaceutical formulation is for treatment of a muscle wasting disease. In a further embodiment, the pharmaceutical formulation is for increasing mass of muscle tissue. In a further embodiment, the pharmaceutical formulation is for increasing strength of muscle tissue. In a further embodiment, the pharmaceutical formulation is for reducing body fat accumulation. An anti-myostatin antibody of the present invention may exhibit pH-dependent binding characteristics. In a further embodiment, the pharmaceutical formulation is for enhancing the clearance of myostatin from plasma. In one embodiment, the pharmaceutical formulation is administered to an individual having a muscle wasting disease. An “individual” according to any of the above embodiments is preferably a human.

[0506] In a further aspect, the invention provides methods for preparing a medicament or a pharmaceutical formulation, comprising mixing any of the anti-myostatin antibodies provided herein with a pharmaceutically acceptable carrier, e.g., for use in any of the above therapeutic methods. In one embodiment, the methods for preparing a medicament or a pharmaceutical formulation further comprise adding at least one additional therapeutic agent to the medicament or pharmaceutical formulation.

[0507] In certain embodiments, a muscle wasting disease is selected from the group consisting of muscular dystrophy (MD; including Duchenne muscular dystrophy), amyotrophic lateral sclerosis (ALS), muscle atrophy, organ atrophy, carpal tunnel syndrome, frailty, congestive obstructive pulmonary disease (COPD), sarcopenia, cachexia, muscle wasting syndromes, HIV-induced muscle wasting, type 2 diabetes, impaired glucose tolerance, metabolic syndrome (including syndrome X), insulin resistance (including resistance induced by trauma, e.g., burns or nitrogen imbalance), adipose tissue disorders (e.g., obesity, dyslipidemia, nonalcoholic fatty liver disease, etc.), osteoporosis, osteopenia, osteoarthritis, and metabolic bone disorders (including low bone mass, premature gonadal failure, androgen suppression, vitamin D deficiency, secondary hyperparathyroidism, nutritional deficiencies, and anorexia nervosa).

[0508] Any of the polypeptide comprising a variant Fc region provided herein may be used in therapeutic methods. In a further aspect, the invention provides pharmaceutical formulations comprising a polypeptide comprising any of the polypeptides comprising variant Fc regions provided herein, e.g., for use in therapeutic methods. In one embodiment, a pharmaceutical formulation comprises a polypeptide comprising any of the polypeptides comprising variant Fc regions provided herein and a pharmaceutically acceptable carrier. In another embodiment, a pharmaceutical formulation comprises a polypeptide comprising any of the variant Fc regions provided herein and at least one additional therapeutic agent.

[0509] In one aspect, a polypeptide comprising a variant Fc region for use as a medicament is provided. In further aspects, a polypeptide comprising a variant Fc region for use in treating a disorder is provided. In certain embodiments, a polypeptide comprising a variant Fc region for use in a method of treatment is provided. In certain embodiments, the invention provides a polypeptide comprising a variant Fc region for use in a method of treating an individual having a disorder comprising administering to the individual an effective amount of the polypeptide comprising a variant Fc region provided herein. In one embodiment, the method further comprises administering to the individual an effective amount of at least one additional therapeutic agent. In one embodiment, the “individual” is a human.

[0510] In a further aspect, the invention provides the use of a polypeptide comprising a variant Fc region in the manufacture or preparation of a medicament. In one embodiment, the medicament is for treatment of a disorder. In some aspects, the polypeptide is an antibody. In some aspects, the polypeptide is an Fc fusion protein. In a further embodiment, the medicament is for use in a method of treating a disorder comprising administering to an individual having the disorder to be treated an effective amount of the medicament. In one embodiment, the method further comprises administering to the individual an effective amount of at least one additional therapeutic agent. In one embodiment, the “individual” is a human.

[0511] In a further aspect, the invention provides a method for treating a disorder. In one embodiment, the method comprises administering to an individual having such a disorder an effective amount of a polypeptide comprising a variant Fc region. In one embodiment, the method further comprises administering to the individual an effective amount of at least one additional therapeutic agent. In one embodiment, the “individual” is a human.

[0512] In a further aspect, the invention provides pharmaceutical formulations comprising a polypeptide comprising a variant Fc region provided herein, for use in a therapeutic method such as any of the therapeutic methods described herein. In one embodiment, a pharmaceutical formulation comprises a polypeptide comprising a variant Fc region provided herein and a pharmaceutically acceptable carrier. In another embodiment, a pharmaceutical formulation comprises a polypeptide comprising a variant Fc region provided herein and at least one additional therapeutic agent.

[0513] In a further aspect, the pharmaceutical formulation is for treatment of a disorder. In one embodiment, the pharmaceutical formulation is administered to an individual having a disorder. In one embodiment, the “individual” is a human.

[0514] In further embodiments, the invention provides a polypeptide comprising a variant Fc region for use in suppressing the activation of B cells, mast cells, dendritic cells, and/or basophils. In certain embodiments, the invention provides a polypeptide comprising a variant Fc region for use in a method of suppressing the activation of B cells, mast cells, dendritic cells, and/or basophils in an individual comprising administering to the individual an effective amount of the polypeptide comprising a variant Fc region to suppress the activation of B cells, mast cells, dendritic cells, and/or basophils. In one embodiment, the “individual” is a human.

[0515] In a further aspect, the invention provides the use of a polypeptide comprising a variant Fc region in the manufacture or preparation of a medicament. In some aspects, the polypeptide is an antibody. In some aspects, the polypeptide is an Fc fusion protein. In a further embodiment, the medicament is for suppressing the activation of B cells, mast cells, dendritic cells, and/or basophils. In a further embodiment, the medicament is for use in a method of suppressing the activation of B cells, mast cells, dendritic cells, and/or basophils in an individual comprising administering to the individual an effective amount of the medicament to suppress the activation of B cells, mast cells, dendritic cells, and/or basophils. In one embodiment, the “individual” is a human.

[0516] In a further aspect, the invention provides a method for suppressing the activation of B cells, mast cells, dendritic cells, and/or basophils in an individual. In one embodiment, the method comprises administering to the individual an effective amount of a polypeptide comprising a variant Fc region to suppress the activation of B cells, mast cells, dendritic cells, and/or basophils. In one embodiment, the “individual” is a human.

[0517] In a further aspect, the invention provides pharmaceutical formulations comprising a polypeptide comprising a variant Fc sequence. In a further embodiment, the pharmaceutical formulation is for suppressing the activation of B cells, mast cells, dendritic cells, and/or basophils.

[0518] Polypeptides comprising a variant Fc region of the present invention can suppress the activation of B cells, mast cells, dendritic cells, and/or basophils. It has been reported that cross-linking of FcεRI with FcγRIIb on basophils using an anti-IgE antibody which has the potential to bind simultaneously to FcεRI-bound IgE, via its Fab regions, and the negative regulatory receptor, FcγRIIb, via its Fc region, leads to inhibition of basophil degranulation (Clin. Exp. Allergy 38: 313-319 (2008)). Without wishing to be bound by theory, it is believed that direct or indirect cross-linking of FcγRIIb with molecules that are expressed on B cells, mast cells, dendritic cells, and/or basophils (such as BCR, CD19, CD79b, FcεRI, DAP 12, and CD200R3) which comprise the ITAM domain inside the cell or interact with the ITAM domain can suppress the activation of those cells. Use of an antibody, for example, which comprises Fab regions which bind to the molecules described above and a variant Fc region of the present invention which selectively binds to FcγRIIb, is expected to cause the suppressive effects. As used herein, “B cell activation” includes proliferation, IgE production, IgM production, and IgA production. “activation of mast cells” includes proliferation, activation by IgE, and degranulation. “activation of basophils” includes proliferation and degranulation of basophils. “activation of dendritic cells” includes proliferation and degranulation of dendritic cells.

[0519] In some embodiments, the invention provides a method of suppressing the activation of an immune cell in a biological sample comprising contacting a biological sample containing an immune cell with a polypeptide comprising a variant Fc sequence (region) provided herein under conditions permissive for binding of the polypeptide to the immune cell, and suppressing the activation of the immune cell. In some embodiments, the immune cell is a B cell, mast cell, dendritic cell, or basophil. In some embodiments, the polypeptide contains a variant Fc sequence (region) comprising at least one amino acid alteration in a parent Fc region, wherein the ratio of [KD value of the parent Fc region for monkey FcγRIIb]/[KD value of the variant Fc region for monkey FcγRIIb] is 2.0 or greater, and the ratio of [KD value of the parent Fc region for monkey FcγRIIIa]/[KD value of the variant Fc region for monkey FcγRIIa] is 0.5 or smaller. In some embodiments, the polypeptide contains an Fc sequence (region) comprising at least two amino acid alterations of at least two positions selected from the group consisting of: 285, 311, 312, 315, 318, 333, 335, 337, 341, 342, 343, 384, 385, 388, 390, 399, 400, 401, 402, 413, 420, 422, and 431, according to EU numbering. In some embodiments, the polypeptide comprises the amino acid sequence of SEQ ID NO: 229-380, or 381.

[0520] In some embodiments, the invention provides a method of treating an individual having an immunological inflammatory disease, autoimmune disease, or viral infection comprising administering to the individual an effective amount of a polypeptide comprising a variant Fc sequence (region) provided herein. In some embodiments, the polypeptide contains a variant Fc sequence comprising at least one amino acid alteration in a parent Fc region, wherein the ratio of [KD value of the parent Fc region for monkey FcγRIIb]/[KD value of the variant Fc region for monkey FcγRIIb] is 2.0 or greater, and the ratio of [KD value of the parent Fc region for monkey FcγRIIIa]/[KD value of the variant Fc region for monkey FcγRIIa] is 0.5 or smaller. In some embodiments, the polypeptide contains an Fc sequence (region) comprising at least two amino acid alterations of at least two positions selected from the group consisting of: 285, 311, 312, 315, 318, 333, 335, 337, 341, 342, 343, 384, 385, 388, 390, 399, 400, 401, 402, 413, 420, 422, and 431, according to EU numbering. In some embodiments, the polypeptide comprises the amino acid sequence of SEQ ID NO: 229-380, or 381.

[0521] In further embodiments, the invention provides a polypeptide comprising a variant Fc sequence provided herein for use in treating an immunological inflammatory disease. In certain embodiments, the invention provides a polypeptide comprising a variant Fc sequence for use in a method of treating an immunological inflammatory disease in an individual comprising administering to the individual an effective amount of the polypeptide comprising a variant Fc sequence to treat an immunological inflammatory disease. In one embodiment, the “individual” is a human.

[0522] In a further aspect, the invention provides the use of a polypeptide comprising a variant Fc sequence provided herein in the manufacture or preparation of a medicament. In some aspects, the polypeptide is an antibody. In some aspects, the polypeptide is an Fc fusion protein. In a further embodiment, the medicament is for treating an immunological inflammatory disease. In a further embodiment, the medicament is for use in a method of treating an immunological inflammatory disease in an individual comprising administering to the individual an effective amount of the medicament to treat immunological inflammatory diseases. An “individual” according to any of the above embodiments may be a human.

[0523] In a further aspect, the invention provides a method for treating an immunological inflammatory disease in an individual. In one embodiment, the method comprises administering to the individual an effective amount of a polypeptide comprising a variant Fc region to treat immunological inflammatory diseases. In one embodiment, an “individual” is a human.

[0524] In a further aspect, the invention provides pharmaceutical formulations comprising any of the polypeptides comprising a variant Fc region provided herein. In a further embodiment, the pharmaceutical formulation is for treating an immunological inflammatory disease.

[0525] As described above, since polypeptides comprising a variant Fc region of the present invention can suppress activation of B cells, mast cells, dendritic cells and/or basophils, administration of the polypeptides comprising a variant Fc region of the present invention as a result can treat or prevent immunological inflammatory diseases.

[0526] In certain embodiments, the treated immunological inflammatory disease is selected from the group consisting of rheumatoid arthritis, autoimmune hepatitis, autoimmune thyroiditis, autoimmune blistering diseases, autoimmune adrenocortical disease, autoimmune hemolytic anemia, autoimmune thrombocytopenic purpura, megalocytic anemia, autoimmune atrophic gastritis, autoimmune neutropenia, autoimmune orchitis, autoimmune encephalomyelitis, autoimmune receptor disease, autoimmune infertility, chronic active hepatitis, glomerulonephritis, interstitial pulmonary fibrosis, multiple sclerosis, Paget's disease, osteoporosis, multiple myeloma, uveitis, acute and chronic spondylitis, gouty arthritis, inflammatory bowel disease, adult respiratory distress syndrome (ARDS), psoriasis, Crohn's disease, Basedow's disease, juvenile diabetes, Addison's disease, myasthenia gravis, lens-induced uveitis, systemic lupus erythematosus, allergic rhinitis, allergic dermatitis, ulcerative colitis, hypersensitivity, muscle degeneration, cachexia, systemic scleroderma, localized scleroderma, Sjogren's syndrome, Behchet's disease, Reiter's syndrome, type I and type II diabetes, bone resorption disorder, graft-versus-host reaction, ischemia-reperfusion injury, atherosclerosis, brain trauma, cerebral malaria, sepsis, septic shock, toxic shock syndrome, fever, malgias due to staining, aplastic anemia, hemolytic anemia, idiopathic thrombocytopenia, Goodpasture's syndrome, Guillain-Barre syndrome, Hashimoto's thyroiditis, pemphigus, IgA nephropathy, pollinosis, antiphospholipid antibody syndrome, polymyositis, Wegener's granulomatosis, arteritis nodosa, mixed connective tissue disease, fibromyalgia, asthma, atopic dermatitis, chronic atrophic gastritis, primary biliary cirrhosis, primary sclerosing cholangitis, autoimmune pancreatitis, aortitis syndrome, rapidly progressive glomerulonephritis, megaloblastic anemia, idiopathic thrombocytopenic purpura, primary hypothyroidism, idiopathic Addison's disease, insulin-dependent diabetes mellitus, chronic discoid lupus erythematosus, pemphigoid, herpes gestationis, linear IgA bullous dermatosis, epidermolysis bullosa acquisita, alopecia areata, vitiligo vulgaris, leukoderma acquisitum centrifugum of Sutton, Harada's disease, autoimmune optic neuropathy, idiopathic azoospermia, habitual abortion, hypoglycemia, chronic urticaria, ankylosing spondylitis, psoriatic arthritis, enteropathic arthritis, reactive arthritis, spondyloarthropathy, enthesopathy, irritable bowel syndrome, chronic fatigue syndrome, dermatomyositis, inclusion body myositis, Schmidt's syndrome, Graves' disease, pernicious anemia, lupoid hepatitis, presenile dementia, Alzheimer's disease, demyelinating disorder, amyotrophic lateral sclerosis, hypoparathyroidism, Dressler's syndrome, Eaton-Lambert syndrome, dermatitis herpetiformis, alopecia, progressive systemic sclerosis, CREST syndrome (calcinosis, Raynaud's phenomenon, esophageal dysmotility, sclerodactyly, and telangiectasia), sarcoidosis, rheumatic fever, erythema multiforme, Cushing's syndrome, transfusion reaction, Hansen's disease, Takayasu arteritis, polymyalgia rheumatica, temporal arteritis, giant cell arthritis, eczema, lymphomatoid granulomatosis, Kawasaki disease, endocarditis, endomyocardial fibrosis, endophthalmitis, fetal erythroblastosis, eosinophilic fasciitis, Felty syndrome, Henoch-Schonlein purpura, transplant rejection, mumps, cardiomyopathy, purulent arthritis, familial Mediterranean fever, Muckle-Wells syndrome, and hyper-IgD syndrome.

[0527] In further embodiments, the invention provides a polypeptide comprising a variant Fc region for use in treating or preventing an autoimmune diseases which may be caused or associated with the production of antibodies against autoantigens (autoantibodies). In certain embodiments, the invention provides a polypeptide comprising a variant Fc region for use in a method of treating or preventing an autoimmune disease which may be caused by, or associated with, the production of antibodies against an autoantigen (autoantibody) in an individual comprising administering to the individual an effective amount of the polypeptide comprising a variant Fc region to treat or prevent the autoimmune disease. An “individual” according to any of the above embodiments is preferably a human.

[0528] In a further aspect, the invention provides the use of a polypeptide comprising a variant Fc region in the manufacture or preparation of a medicament. In some aspects, the polypeptide is an antibody. In some aspects, the polypeptide is an Fc fusion protein. In a further embodiment, the medicament is for treating or preventing an autoimmune disease which may be caused by production of antibodies against autoantigens (autoantibodies). In a further embodiment, the medicament is for use in a method of treating or preventing an autoimmune disease that is associated with production of antibodies against autoantigens (autoantibodies) in an individual comprising administering to the individual an effective amount of the medicament to treat or prevent the autoimmune disease. An “individual” according to any of the above embodiments may be a human.

[0529] In a further aspect, the invention provides a method for treating or preventing autoimmune diseases which may be caused by production of antibodies against autoantigens (autoantibodies) in an individual. In one embodiment, the method comprises administering to the individual an effective amount of a polypeptide comprising a variant Fc region to treat or prevent the autoimmune disease. In one embodiment, an “individual” is a human.

[0530] In a further aspect, the invention provides pharmaceutical formulations comprising any of the polypeptides comprising a variant Fc region provided herein. In a further embodiment, the pharmaceutical formulation is for treating or preventing an autoimmune disease which may be caused by production of antibodies against an autoantigen (autoantibodies).

[0531] The polypeptides comprising a variant Fc region of the present invention can treat or prevent an autoimmune disease which may be caused by production of antibodies against an autoantigen (autoantibodies) by suppressing production of those autoantibodies. Use of a fusion molecule of an antibody Fc portion with AchR (an autoantigen of myasthenia gravis) has been reported to suppress proliferation of B cells which express AchR-recognizing BCR, and induce apoptosis (J. Neuroimmunol 227: 35-43 (2010)). Use of a fusion protein formed between a variant Fc region of the present invention and an antigen recognized by an autoantibody enables crosslinking of FcγRIIb with BCR for that autoantigen on a B cell, which causes suppression of proliferation and induction of apoptosis of the B cells.

[0532] In certain embodiments, an autoimmune disease that can be treated or prevented is selected from the group consisting of Guillain-Barre syndrome, myasthenia gravis, chronic atrophic gastritis, autoimmune hepatitis, primary biliary cirrhosis, primary sclerosing cholangitis, autoimmune pancreatitis, aortitis syndrome, Goodpasture's syndrome, rapidly progressive glomerulonephritis, megaloblastic anemia, autoimmune hemolytic anemia, autoimmune neutropenia, idiopathic thrombocytopenic purpupura, Basedow's disease, Hashimoto's thyroiditis, primary hypothyroidism, idiopathic Addison's disease, insulin-dependent diabetes mellitus, chronic discoid lupus erythematosus, localized scleroderma, pemphigus, pemphigoid, herpes gestationis, linear IgA bullous dermatosis, epidermolysis bullosa acquisita, alopecia areata, vitiligo vulgaris, leukoderma acquisitum centrifugum of Sutton, Harada's disease, autoimmune optic neuropathy, idiopathic azoospermia, habitual abortion, type II diabetes, hypoglycemia, and chronic urticaria.

[0533] In further embodiments, the invention provides a polypeptide comprising a variant Fc region for use in treating a disease associated with a deficiency of a biologically essential protein. In certain embodiments, the invention provides a polypeptide comprising a variant Fc region for use in a method of treating a disease associated with a deficiency of a biologically essential protein in an individual comprising administering to the individual an effective amount of the polypeptide comprising a variant Fc region to treat the disease. An “individual” according to any of the above embodiments is preferably a human.

[0534] In a further aspect, the invention provides the use of a polypeptide comprising a variant Fc region in the manufacture or preparation of a medicament. In some aspects, the polypeptide is an antibody. In some aspects, the polypeptide is an Fc fusion protein. In a further embodiment, the medicament is for treating a disease associated with a deficiency of a biologically essential protein. In a further embodiment, the medicament is for use in a method of treating a disease associated with a deficiency of a biologically essential protein in an individual comprising administering to the individual an effective amount of the medicament to treat the disease. An “individual” according to any of the above embodiments may be a human.

[0535] In a further aspect, the invention provides a method for treating a disease associated with a deficiency of a biologically essential protein in an individual. In one embodiment, the method comprises administering to the individual an effective amount of a polypeptide comprising a variant Fc region to treat the disease. In one embodiment, an “individual” is a human.

[0536] In a further aspect, the invention provides pharmaceutical formulations comprising any of the polypeptides comprising a variant Fc region provided herein. In a further embodiment, the pharmaceutical formulation is for treating a disease associated with a deficiency of a biologically essential protein.

[0537] For diseases with deficiency of a biologically essential protein, therapeutic methods that administer and supplement the protein as a pharmaceutical agent are used. However, since the patient lacks the protein from the beginning, the externally supplemented protein is recognized as a foreign substance and antibodies against that protein are produced. As a result, the protein becomes easily removed, and the effect as a pharmaceutical is reduced. Use of a fusion protein comprising such a protein and a variant Fc region of the present invention enables crosslinking between FcγRIIb and BCR that recognizes the protein on B cells, which causes suppression of antibody production against the protein.

[0538] In certain embodiments, the protein to be supplemented is selected from the group consisting of Factor VIII, Factor IX, TPO, EPO, α-iduronidase, iduronate sulfatase, A-type heparan N-sulfatase, B type α-N-acetylglucosaminidase, C type acetyl CoA: α-glucosaminidase acetyltransferase, D type N-acetylglucosamine 6-sulfatase, galactose 6-sulfatase, N-acetylgalactosamine 4-sulfatase, β-glucuronidase, α-galactosidase, acidic α-galactosidase, and glucocerebrosidase. These proteins may be supplemented for diseases such as hemophilia, idiopathic thrombocytopenic purpura, renal anemia, and lysosomal disease (mucopolysaccharidosis, Fabry's disease, Pompe disease, and Gaucher's disease), without being limited thereto.

[0539] In further embodiments, the invention provides a polypeptide comprising a variant Fc region for use in treating a viral infection. In certain embodiments, the invention provides a polypeptide comprising a variant Fc region for use in a method of treating a viral infection in an individual comprising administering to the individual an effective amount of the polypeptide comprising a variant Fc region to treat a viral infection. An “individual” according to any of the above embodiments is preferably a human.

[0540] In a further aspect, the invention provides the use of a polypeptide comprising a variant Fc region provided herein in the manufacture or preparation of a medicament. In some aspects, the polypeptide is an antibody. In some aspects, the polypeptide is an Fc fusion protein. In a further embodiment, the medicament is for treating a viral infection. In a further embodiment, the medicament is for use in a method of treating a viral infection in an individual comprising administering to the individual an effective amount of the medicament to treat a viral infection. An “individual” according to any of the above embodiments may be a human.

[0541] In a further aspect, the invention provides a method for treating a viral infection in an individual. In one embodiment, the method comprises administering to the individual an effective amount of a polypeptide comprising a variant Fc region to treat a viral infection. In one embodiment, an “individual” is a human.

[0542] In a further aspect, the invention provides pharmaceutical formulations comprising any of the polypeptides comprising a variant Fc region provided herein. In a further embodiment, the pharmaceutical formulation is for treating a viral infection.

[0543] Anti-virus antibodies that comprise a variant Fc region of the present invention can suppress antibody-dependent enhancement observed with conventional anti-virus antibodies. Antibody-dependent enhancement is a phenomenon where a virus bound to an antibody is phagocytosed via activating FcγRs so that infection of the virus to a cell is enhanced. Binding of anti-dengue-virus antibodies to FcγRIIb has been reported to play an important role in suppressing antibody-dependent enhancement (Proc. Natl. Acad. Sci. USA 108:12479-12484, (2011)). Crosslinking FcγRIIb molecules by an immune complex of the anti-dengue-virus antibodies and dengue virus, inhibits FcγR-mediated phagocytosis, resulting in the suppression of antibody-dependent enhancement. Examples of such viruses include dengue virus (DENV1, DENV2, DENV3, and DENV4) and HIV, but are not limited thereto.

[0544] In further embodiments, the invention provides a polypeptide comprising a variant Fc region for use in preventing or treating arteriosclerosis. In certain embodiments, the invention provides a polypeptide comprising a variant Fc region for use in a method of preventing or treating arteriosclerosis in an individual comprising administering to the individual an effective amount of the polypeptide comprising a variant Fc region to prevent or treat arteriosclerosis. In some aspects, the polypeptide is an antibody. In some aspects, the polypeptide is an Fc fusion protein. An “individual” according to any of the above embodiments is preferably a human.

[0545] In a further aspect, the invention provides the use of a polypeptide comprising a variant Fc region in the manufacture or preparation of a medicament. In some aspects, the polypeptide is an antibody. In some aspects, the polypeptide is an Fc fusion protein. In a further embodiment, the medicament is for preventing or treating arteriosclerosis. In a further embodiment, the medicament is for use in a method of preventing or treating arteriosclerosis in an individual comprising administering to the individual an effective amount of the medicament to prevent or treat arteriosclerosis. An “individual” according to any of the above embodiments may be a human.

[0546] In a further aspect, the invention provides a method for preventing or treating arteriosclerosis in an individual. In one embodiment, the method comprises administering to the individual an effective amount of a polypeptide comprising a variant Fc region to prevent or treat arteriosclerosis. In one embodiment, an “individual” is a human.

[0547] In a further aspect, the invention provides pharmaceutical formulations comprising any of the polypeptides comprising a variant Fc region provided herein. In some aspects, the polypeptide is an antibody. In some aspects, the polypeptide is an Fc fusion protein. In a further embodiment, the pharmaceutical formulation is for preventing or treating arteriosclerosis.

[0548] Antibodies against oxidized LDL, i.e., a cause for arteriosclerosis, comprising a variant Fc region of the present invention can prevent FcγRIIa-dependent adhesion of inflammatory cells. It has been reported that while anti-oxidized LDL antibodies inhibit the interaction between oxidized LDL and CD36, anti-oxidized LDL antibodies bind to endothelial cells, and monocytes recognize their Fc portion in an FcγRIIa-dependent or FcγRI-dependent manner (Immunol. Lett. 108:52-61, (2007)). Using antibodies comprising a variant Fc region of the present invention may inhibit FcγRIIa-dependent binding and suppress monocyte adhesion by FcγRIIb-mediated inhibitory signals.

[0549] In further embodiments, the invention provides a polypeptide comprising a variant Fc region for use in preventing or treating cancer. In certain embodiments, the invention provides a polypeptide comprising a variant Fc region for use in a method of preventing or treating cancer in an individual comprising administering to the individual an effective amount of the polypeptide comprising a variant Fc region to prevent or treat cancer. An “individual” according to any of the above embodiments is preferably a human.

[0550] In a further aspect, the invention provides the use of a polypeptide comprising a variant Fc region provided herein in the manufacture or preparation of a medicament. In some aspects, the polypeptide is an antibody. In some aspects, the polypeptide is an Fc fusion protein. In a further embodiment, the medicament is for preventing or treating cancer. In a further embodiment, the medicament is for use in a method of preventing or treating cancer in an individual comprising administering to the individual an effective amount of the medicament to prevent or treat cancer. An “individual” according to any of the above embodiments may be a human.

[0551] In a further aspect, the invention provides a method for preventing or treating cancer in an individual. In one embodiment, the method comprises administering to the individual an effective amount of a polypeptide comprising a variant Fc region to prevent or treat cancer. In some aspects, the polypeptide is an antibody. In some aspects, the polypeptide is an Fc fusion protein. In one embodiment, an “individual” is a human.

[0552] In a further aspect, the invention provides pharmaceutical formulations comprising any of the polypeptides comprising a variant Fc region provided herein. In some aspects, the polypeptide is an antibody. In some aspects, the polypeptide is an Fe fusion protein. In a further embodiment, the pharmaceutical formulation is for preventing or treating cancer.

[0553] As described above, it is known that enhancing the FcγRIIb binding increases the agonistic activity of an agonist antibody, and enhances the antitumor effect of the antibody. Therefore, agonist antibodies comprising a variant Fc region of the present invention are useful for treatment or prevention of cancer. Specifically, a variant Fe region of the present invention enhances the agonistic activity of antibodies against, for example, receptors of the TNF receptor family such as, CD120a, CD120b, Lymphotoxin β receptor, CD134, CD40, FAS, TNFRSF6B, CD27, CD30, CD137, TNFRSF10A, TNFRSF10B, TNFRSF10C, TNFRSF10D, RANK, Osteoprotegerin, TNFRSF12A, TNFRSF13B, TNFRSF3C, TNFRSF14, Nerve growth factor receptor, TNFRSF17, TNFRSF18, TNFRSF19, TNFRSF21, TNFRSF25, and Ectodysplasin A2 receptor, and can be used for treating or preventing cancer. Furthermore, agonistic activity is also enhanced for antibodies against other molecules, which exhibit agonistic activity through interaction with FcγRIIb. In addition, by incorporating a variant Fc region of the present invention into an antibody against a receptor tyrosine kinase (RTK) such as Kit, which suppresses cell proliferation upon crosslinking with FcγRIIb, the inhibitory effect of the antibody against cell proliferation may be enhanced.

[0554] In some embodiments, the invention provides a method for preventing or treating a cancer including but not limited to a member selected from: small cell lung cancer, non-small cell lung cancer, pulmonary adenocarcinoma, and squamous cell carcinoma of the lung), large intestine cancer, rectal cancer, colon cancer, breast cancer, liver cancer, gastric cancer, pancreatic cancer, renal cancer, prostate cancer, ovarian cancer, thyroid cancer, cholangiocarcinoma, peritoneal cancer, mesothelioma, squamous cell carcinoma, cervical cancer, endometrial cancer, bladder cancer, esophageal cancer, head and neck cancer, nasopharyngeal cancer, salivary gland tumor, thymoma, skin cancer, basal cell tumor, malignant melanoma, anal cancer, penile cancer, testicular cancer, Wilms' tumor, acute myeloid leukemia (including acute myeloleukemia, acute myeloblastic leukemia, acute promyelocytic leukemia, acute myelomonocytic leukemia, and acute monocytic leukemia), chronic myelogenous leukemia, acute lymphoblastic leukemia, chronic lymphatic leukemia, Hodgkin's lymphoma, non-Hodgkin's lymphoma (Burkitt's lymphoma, chronic lymphocytic leukemia, mycosis fungoides, mantle cell lymphoma, follicular lymphoma, diffuse large-cell lymphoma, marginal zone lymphoma, pilocytic leukemia plasmacytoma, peripheral T-cell lymphoma, and adult T cell leukemiallymphoma), Langerhans cell histiocytosis, multiple myeloma, myelodysplastic syndrome, brain tumor (including glioma, astroglioma, glioblastoma, meningioma, and ependymoma), neuroblastoma, retinoblastoma, osteosarcoma, Kaposi's sarcoma, Ewing's sarcoma, angiosarcoma, and hemangiopericytoma.

[0555] Antibodies which have been modified to have enhanced binding activity to FcγRs including FcγRIIb by modification of at least one amino acid residue can promote antigen elimination from the plasma, as described or suggested in, for example, WO 2013/047752, WO 2013/125667, WO 2014/030728, or WO 2014/163101.

[0556] Without being bound by a particular theory, an antibody having an increased FcγR-binding activity under a neutral pH condition is rapidly taken up into cells together with its antigen complexed with the antibody, and as a result, antigen elimination from plasma can be promoted when the antibody is administered in vivo.

[0557] Antibodies which have been modified to have an increased pI by modification of at least one amino acid residue that are exposed on the antibody surface can be incorporated more rapidly into cells or can promote antigen elimination from the plasma, as described or suggested in, for example, WO 2007/114319, WO 2009/041643, WO 2014/145159, or WO 2012/016227.

[0558] Without being bound by a particular theory, it is believed that the pH of biological fluids (for example, plasma) is in a neutral pH range. In biological fluids, the net positive charge of a pI-increased antibody is increased due to the increased pI, and as a result the antibody is more strongly attracted by physicochemical Coulomb interaction to the endothelial cell surface that has a net negative charge compared to an antibody not having an increased pI. That means, via such non-specific binding, uptake into cells of the antibody complexed with its antigen is enhanced, which results in enhancement of antigen elimination from plasma. These phenomena are expected to occur commonly in vivo, regardless of cell type, tissue type, organ type, etc.

[0559] Herein, enhancement of antigen elimination from plasma means, for example, that the rate of antigen elimination from plasma is increased as compared to that when a polypeptide comprising a corresponding Fc region that has not been so modified has been administered. The increase of antigen elimination from plasma can be assessed, for example, by measuring the concentration of the antigen in plasma. Various methods for measuring antigen concentration in plasma are known in the art.

[0560] In further embodiments, the invention provides a polypeptide comprising a variant Fc region for use in promoting elimination of an antigen from plasma. In certain embodiments, the invention provides a polypeptide comprising a variant Fc region for use in a method of promoting elimination of an antigen from plasma in an individual comprising administering to the individual an effective amount of the polypeptide comprising a variant Fc region to promote elimination of an antigen from plasma. In those embodiments, it is preferable that the polypeptide further comprises an antigen-binding domain. An “individual” according to any of the above embodiments is preferably a human.

[0561] In a further aspect, the invention provides the use of a polypeptide comprising a variant Fc region in the manufacture or preparation of a medicament. In some aspects, the polypeptide is an antibody. In some aspects, the polypeptide is an Fc fusion protein. In a further embodiment, the medicament is for promoting elimination of an antigen from plasma. In a further embodiment, the medicament is for use in a method of promoting elimination of an antigen from plasma in an individual comprising administering to the individual an effective amount of the medicament to promote elimination of an antigen from plasma. In those embodiments, it is preferable that the polypeptide further comprises an antigen-binding domain. An “individual” according to any of the above embodiments may be a human.

[0562] In a further embodiment, the invention provides a method for promoting elimination of an antigen from plasma in an individual. In one embodiment, the method comprises administering to the individual an effective amount of a polypeptide comprising a variant Fc region to promote elimination of an antigen from plasma. In those embodiments, it is preferable that the polypeptide further comprises an antigen-binding domain. In one embodiment, an “individual” is a human.

[0563] In a further aspect, the invention provides pharmaceutical formulations comprising any of the polypeptides comprising a variant Fc region provided herein. In a further embodiment, the pharmaceutical formulation is for promoting elimination of an antigen from plasma. In that embodiment, it is preferable that the polypeptide further comprises an antigen-binding domain.

[0564] In one embodiment, when compared to before amino acid modification, an antibody having a variant Fc region of the present invention enhances antigen elimination from plasma, for example, by at least 1.1-fold, 1.25-fold, 1.5-fold, 1.75-fold, 2.0-fold, 2.25-fold, 2.5-fold, 2.75-fold, 3.0-fold, 3.25-fold, 3.5-fold, 3.75-fold, 4.0-fold, 4.25-fold, 4.5-fold, 4.75-fold, 5.0-fold, 5.5-fold, 6.0-fold, 6.5-fold, 7.0-fold, 7.5-fold, 8.0-fold, 8.5-fold, 9.0-fold, 9.5-fold, or 10.0-fold or more, when the antibody is administered in vivo.

[0565] In a further aspect, the invention provides methods for preparing a medicament or a pharmaceutical formulation, comprising mixing any of the polypeptides comprising a variant Fc region provided herein with a pharmaceutically acceptable carrier, e.g., for use in any of the above therapeutic methods. In one embodiment, the methods for preparing a medicament or a pharmaceutical formulation further comprise adding at least one additional therapeutic agent to the medicament or pharmaceutical formulation.

[0566] Antibodies of the invention can be used either alone or in combination with other agents in a therapy. For instance, an antibody of the invention may be co-administered with at least one additional therapeutic agent.

[0567] Likewise, polypeptides comprising a variant Fc region of the invention can be used either alone or in combination with other agents in a therapy. For instance, a polypeptide comprising a variant Fc region of the invention may be co-administered with at least one additional therapeutic agent.

[0568] Such combination therapies noted above encompass combined administration (where two or more therapeutic agents are included in the same or separate formulations), and separate administration, in which case, administration of the antibody or polypeptide comprising a variant Fc region of the invention can occur prior to, simultaneously, and/or following, administration of the additional therapeutic agent or agents. In one embodiment, the administration of the anti-myostatin antibody and the administration of an additional therapeutic agent occur within about one month, or within about one, two or three weeks, or within about one, two, three, four, five, or six days, of each other.

[0569] In another embodiment, the administration of the polypeptide comprising the variant Fc region and the administration of an additional therapeutic agent occur within about one month, or within about one, two or three weeks, or within about one, two, three, four, five, or six days, of each other.

[0570] An antibody or a polypeptide comprising a variant Fc region of the invention (and optionally any additional therapeutic agent) can be administered by any suitable means, including parenteral, intrapulmonary, and intranasal, and, if desired for local treatment, intralesional administration. Parenteral infusions include intramuscular, intravenous, intraarterial, intraperitoneal, or subcutaneous administration. Dosing can be by any suitable route, e.g., by injections, such as intravenous or subcutaneous injections, depending in part on whether the administration is brief or chronic. Various dosing schedules including but not limited to single or multiple administrations over various time-points, bolus administration, and pulse infusion are contemplated herein.

[0571] Antibodies or polypeptides comprising a variant Fc region of the invention can be formulated, dosed, and administered in a fashion consistent with good medical practice. Factors for consideration in this context include the particular disorder being treated, the particular mammal being treated, the clinical condition of the individual patient, the cause of the disorder, the site of delivery of the agent, the method of administration, the scheduling of administration, and other factors known to medical practitioners. The antibody need not be, but is optionally formulated with one or more agents currently used to prevent or treat the disorder in question. The effective amount of such other agents depends on the amount of antibody present in the formulation, the type of disorder or treatment, and other factors discussed above. These are generally used in the same dosages and with administration routes as described herein, or about from 1 to 99% of the dosages described herein, or in any dosage and by any route that is empirically/clinically determined to be appropriate.

[0572] For the prevention or treatment of disease, the appropriate dosage of an antibody of the invention (when used alone or in combination with one or more other additional therapeutic agents) will depend on the type of disease to be treated, the type of antibody, the type of polypeptide comprising a variant Fc region, the severity and course of the disease, whether the antibody or polypeptide comprising the variant Fc region, is administered for preventive or therapeutic purposes, previous therapy, the patient's clinical history and response to the antibody or polypeptide comprising the variant Fc region, and the discretion of the attending physician. The antibody or polypeptide comprising a variant Fc region of the invention is suitably administered to the patient at one time or over a series of treatments. Depending on the type and severity of the disease, about 1 μg/kg to 15 mg/kg (e.g., 0.1 mg/kg-10 mg/kg) of antibody can be an initial candidate dosage for administration to the patient, whether, for example, by one or more separate administrations, or by continuous infusion. One typical daily dosage might range from about 1 μg/kg to 100 mg/kg or more, depending on the factors mentioned above. For repeated administrations over several days or longer, depending on the condition, the treatment would generally be sustained until a desired suppression of disease symptoms occurs. One exemplary dosage of the antibody or polypeptide comprising the variant Fc region would be in the range from about 0.05 mg/kg to about 10 mg/kg. Thus, one or more doses of about 0.5 mg/kg, 2.0 mg/kg, 4.0 mg/kg or 10 mg/kg (or any combination thereof) may be administered to the patient. Such doses may be administered intermittently, e.g., every week or every three weeks (e.g., such that the patient receives from about two to about twenty, or e.g., about six doses of the antibody or polypeptide comprising the variant Fc region). An initial higher loading dose, followed by one or more lower doses may be administered. The progress of this therapy is easily monitored by conventional techniques and assays.

[0573] It is understood that any of the above formulations or therapeutic methods may be carried out using an immunoconjugate of the invention in place of or in addition to an anti-myostatin antibody.

[0574] It is likewise understood that any of the above formulations or therapeutic methods may be carried out using an immunoconjugate of the invention in place of or in addition to a polypeptide comprising a variant Fc region provided herein.

[0575] H. Articles of Manufacture

[0576] In another aspect of the invention, an article of manufacture containing materials useful for the treatment, prevention and/or diagnosis of the disorders described above is provided. The article of manufacture comprises a container and a label or package insert on or associated with the container. Suitable containers include, for example, bottles, vials, syringes, IV solution bags, etc. The containers may be formed from a variety of materials such as glass or plastic. The container holds a composition which is by itself or combined with another composition effective for treating, preventing and/or diagnosing the condition and may have a sterile access port (for example the container may be an intravenous solution bag or a vial having a stopper pierceable by a hypodermic injection needle). At least one active agent in the composition is an antibody of the invention. The label or package insert indicates that the composition is used for treating the condition of choice. Moreover, the article of manufacture may comprise (a) a first container with a composition contained therein, wherein the composition comprises an antibody of the invention; and (b) a second container with a composition contained therein, wherein the composition comprises a further cytotoxic or otherwise therapeutic agent. The article of manufacture in this embodiment of the invention may further comprise a package insert indicating that the compositions can be used to treat a particular condition. Alternatively, or additionally, the article of manufacture may further comprise a second (or third) container comprising a pharmaceutically-acceptable buffer, such as bacteriostatic water for injection (BWFI), phosphate-buffered saline, Ringer's solution and dextrose solution. It may further include other materials desirable from a commercial and user standpoint, including other buffers, diluents, filters, needles, and syringes.

[0577] It is understood that any of the above articles of manufacture may include an immunoconjugate of the invention in place of or in addition to an anti-myostatin antibody.

### EXAMPLES

[0578] The following are examples of methods and compositions of the invention. It is understood that various other embodiments may be practiced, given the general description provided above.

### Example 1

### Expression and Purification of Human, Cynomolgus Monkey, and Mouse Myostatin Latent and Mature Form

[0579] Human latent myostatin (also described herein as human myostatin latent form) (SEQ ID NO: 1) was expressed transiently using FreeStyle293-F cells (FS293-F cells) (Thermo Fisher, Carlsbad, Calif., USA). Conditioned media containing expressed human myostatin latent form was acidified to pH6.8 and diluted with ½ vol of milliQ water, followed by application to a Q-sepharose FF anion exchange column (GE healthcare, Uppsala, Sweden). The flow-through fraction was adjusted to pH5.0 and applied to a SP-sepharose HP cation exchange column (GE healthcare, Uppsala, Sweden), and then eluted with a NaCl gradient. Fractions containing the human myostatin latent form were collected and subsequently subjected to a Superdex 200 gel filtration column (GE healthcare, Uppsala, Sweden) equilibrated with 1×PBS. Fractions containing the human myostatin latent form were then pooled and stored at −80° C.

[0580] Human mature myostatin (also described herein as human myostatin mature form) (SEQ ID NO: 2) was purified from the purified human myostatin latent form. The human myostatin latent form was acidified by addition of 0.1% trifluoroacetic acid (TFA) and applied to a Vydac 214TP C4 reverse phase column (Grace, Deerfield, Ill., USA) and eluted with a TFA/CH₃CN gradient. Fractions containing human mature myostatin were pooled, dried and stored at −80° C. To reconstitute, human mature myostatin was dissolved in 4 mM HCl.

[0581] Expression and purification of myostatin latent and mature form from cynomolgus monkey (cynomolgus or cyno) (SEQ ID NOs: 3 and 4, respectively) and mouse (SEQ ID NOs: 5 and 6, respectively) were all performed exactly the same way as the human counterpart. The sequence homology of mature form among human, cyno, and mouse are 100% identical, therefore, any of mature myostatin regardless of species were used as mature myostatin in all the necessary experiments.

### Example 2

### Identification of Anti-Latent Myostatin Antibody

[0582] Anti-latent myostatin antibodies were prepared, selected, and assayed as follows.

[0583] Twelve to sixteen week old NZW rabbits were immunized intradermally with mouse latent myostatin and/or human latent myostatin (50-100 μg/dose/rabbit). This dose was repeated 3-4 times over a one month period. One week after the final immunization, the spleen and blood from the immunized rabbit were collected. Antigen-specific B-cells were stained with labelled antigen, sorted with FCM cell sorter (FACS aria III, BD), and plated in 96-well plates at a one cell/well density together with 25,000 cells/well of EL4 cells (European Collection of Cell Cultures) and with rabbit T-cell conditioned medium diluted 20 times, and were cultured for 7-12 days. EL4 cells were treated with mitomycin C (Sigma) for 2 hours and washed 3 times in advance. The rabbit T-cell conditioned medium was prepared by culturing rabbit thymocytes in RPMI-1640 containing Phytohemagglutinin-M (Roche), phorbol 12-myristate 13-acetate (Sigma) and 2% FBS. After cultivation, B-cell culture supernatants were collected for further analysis and pellets were cryopreserved.

[0584] An ELISA assay was used to test the specificity of antibodies in a B-cell culture supernatant. Streptavidin (GeneScript) was coated onto a 384-well MAXISorp (Nunc) at 50 nM in PBS for 1 hour at room temperature. Plates were then blocked with Blocking One (Nacalai Tesque) diluted 5 times. Human or mouse latent myostatin was labelled with NHS-PEG4-Biotin (PIERCE) and was added to the blocked ELISA plates, incubated for 1 hour, and washed with Tris-buffered saline with 0.05% Tween-20 (TBS-T). B-cell culture supernatants were added to the ELISA plates, incubated for 1 hour, and washed with TBS-T. Binding was detected by goat anti-rabbit IgG-horseradish peroxidase (BETHYL) followed by the addition of ABTS (KPL).

[0585] A total of 17,818 B-cell lines were screened for binding specificity to mouse and/or human latent myostatin and 299 lines were selected and designated MST0255-287, 630-632, 677-759, 910, 932-1048, 1050-1055, 1057-1066, 1068, 1070-1073, 1075-1110, 1113-1119. RNA was purified from corresponding cell pellets using ZR-96 Quick-RNA kits (ZYMO RESEARCH).

[0586] DNA encoding the variable regions of the heavy and light chain of each selected cell line was amplified by reverse transcription PCR and cloned into expression vectors with the heavy chain constant region Glm sequence (SEQ ID NO: 50 (the amino acid sequence is shown in SEQ ID NO: 7)) and with the light chain constant region k0MTC or k0MC sequence (SEQ ID NO: 53 or 194 (the amino acid sequence (both are the same) is shown in SEQ ID NO: 8)), respectively. Recombinant antibodies were expressed transiently using the FreeStyle FS293-F cells and 293 fectin (Life technologies), according to the manufacturer's instructions. Culture supernatant or recombinant antibodies were used for screening. Recombinant antibodies were purified with protein A (GE Healthcare) and eluted in D-PBS or His buffer (20 mM Histidine, 150 mM NaCl, pH6.0). Size exclusion chromatography was further conducted to remove high molecular weight and/or low molecular weight component, if necessary.

### Example 3

### Characterization of Anti-Latent Myostatin Antibody (HEK Blue Assay (BMP1 Activation))

[0587] A reporter gene assay was used to assess the biological activity of active myostatin in vitro. HEK-Blue™ TGF-β cells (Invivogen) which express a Smad3/4-binding elements (SBE)-inducible SEAP reporter genes, allow the detection of bioactive myostatin by monitoring the activation of the activin type 1 and type 2 receptors. Active myostatin stimulates the production of SEAP which is secreted into the cell supernatant. The quantity of SEAP secreted is then assessed using QUANTIBlue™ (Invivogen).

[0588] HEK-Blue™ TGF-β cells were maintained in DMEM medium (Gibco) supplemented with 10% fetal bovine serum, 50 μg/mL streptomycin, 50 U/mL penicillin, 100 μg/mL Normocin™, 301 μg/mL of Blasticidin, 200 μg/mL of HygroGold™ and 100 μg/mL of Zeocin™. During the functional assay, cells were changed to assay medium (DMEM with 0.1% bovine serum albumin, streptomycin, penicillin and Normocin™) and seeded to a 96-well plate. Human, cynamolgus, or mouse latent myostatin was incubated with recombinant human BMP1 (R&D Systems) and anti-latent antibody at 37° C. overnight. The sample mixtures were transferred to cells. After 24-hour incubation, the cell supernatants were mixed with QUANTIBlue™ and the optical density at 620 nm was measured in a colorimetric plate reader. As shown as FIG. 1, mAb MST1032-Glm (see Table 2a for amino acid and nucleotide sequences) prevented protease-mediated activation of human, cynomolgus, and mouse latent myostatin, as reflected by lowered concentrations of secreted SEAP. MST1032-Glm showed almost comparable inhibition activity against human, cynomolgus, and mouse latent myostatin.

### Example 4

### Characterization of Anti-Latent Myostatin Antibody (HEK Blue Assay (Spontaneous Activation))

[0589] Human, cynomolgus, or mouse latent myostatin was incubated with the anti-latent myostatin antibody at 37° C. overnight and the sample mixtures were transferred to HEK-Blue™ TGF-β cells. After 24-hour incubation, cell supernatant was mixed with QUANTIBlue™ and the optical density at 620 nm was measured in a colorimetric plate reader. As shown as FIG. 2, the liberation of active myostatin from its latent form was detected after incubation at 37° C. The presence of mAb MST1032-Glm, myostatin activation was inhibited and thus a lower SEAP level was detected in the cell supernatant. MST1032-G1 m inhibited spontaneous activation of latent myostatin, and showed almost comparable inhibition activity against human, cynomolgus, and mouse latent myostatin.

### Example 5

### Characterization of Anti-Latent Myostatin Antibody (ELISA)

[0590] Uncoated ELISA plates (NUNC-IMMUNO plate MAXISORP surface, Nalge Nunc International) were coated with 20 μL of 50 nM streptavidin (GenScript) for 1 hour at room temperature. Plates were then washed with PBST three times and blocked with 50 μL 20% Blocking One (Nacalai Tesque) overnight. On the next day, each well of each plate was incubated with biotinylated mature myostatin, human or mouse biotinylated latent myostatin, or biotinylated recombinant mouse myostatin propeptide-Fc chimera protein (R&D Systems) at 4 nM/well/20 μL for 2 hours. After washing, 20 L of antibody sample was added to the wells and the plates were left for 1 hour. The plates were washed and 20 L of anti-human IgG-horseradish peroxidase (HRP) (Abcam) diluted in HEPES-buffered saline was added, and the plates were left for another hour. The plates were then washed again, and then 50 μL ABTS (KPL) was added to each well, and the plates were incubated for 1 hour. The signal was detected at 405 nm in a colorimetric plate reader.

[0591] The results of the binding experiment are shown in FIG. 3. MST1032-Glm bound to latent myostatin (i.e., the non-covalent complex of mature myostatin and propeptides) and propeptide, but did not bind to mature myostatin. These results show that MST1032-Glm specifically binds to the myostatin propeptide (e.g., the prppeptide portion), but not to active myostatin (e.g., mature region).

### Example 6

### Characterization of Anti-Latent Myostatin Antibody (Western Blot)

[0592] Mouse latent myostatin was incubated with recombinant human BMP1 (R&D Systems), with or without MST1032-Glm at 37° C. overnight. The samples were then mixed with 4× reducing SDS-PAGE sample buffer (Wako) and heated at 95° C. for 5 minutes and then loaded for SDS gel electrophoresis. Proteins were transferred to membrane by Trans-Blot® Turbo™ Transfer System (Bio-rad). Myostatin propeptide was detected using a sheep anti-mouse GDF8 propeptide antibody (R&D Systems), which was

TABLE 2a
Anti-latent myostatin antibodies and their DNA and amino acid sequences (shown as SEQ ID NOs)

| | | Variable region | | | | Constant region | | | |
|---|---|---|---|---|---|---|---|---|---|
| | | Heavy | | Light | | Heavy | | Light | |
| Antibody name | Abbreviation | DNA | PROTEIN | DNA | PROTEIN | DNA | PROTEIN | DNA | PROTEIN |
| MS_MST1032Ha-G1m/MST1032La-k0MC | MST1032-G1m | 039 | 012 | 041 | 014 | 050 | 007 | 194 | 008 |
| MS_MST1032Ha-F760/MST1032La-k0MC | MST1032-F760 | 039 | 012 | 041 | 014 | 051 | 011 | 194 | 008 |
| MS_M103205H000-SG1/M103202L000-SK1 | MS1032LO00-SG1 | 040 | 013 | 042 | 015 | 052 | 009 | 054 | 010 |
| | or Ab001 | | | | | | | | |
| MS_M103205H000-F760/M103202L000-SK1 | MS1032LO00-F760 | 040 | 013 | 042 | 015 | 051 | 011 | 054 | 010 |
| MS_M103205H714-SG1/M103202L861-SK1 | MS1032LO01-SG1 | 043 | 032 | 046 | 035 | 052 | 009 | 054 | 010 |
| MS_M103205H781-SG1/M103202L719-SK1 | MS1032LO02-SG1 | 044 | 033 | 047 | 036 | 052 | 009 | 054 | 010 |
| MS_M103205H781-SG1/M103202L813-SK1 | MS1032LO03-SG1 | 044 | 033 | 048 | 037 | 052 | 009 | 054 | 010 |
| MS_M103205H707-SG1/M103202L802-SK1 | MS1032LO04-SG1 | 045 | 034 | 049 | 038 | 052 | 009 | 054 | 010 |
| MS_M103205H714-F760/M103202L861-SK1 | MS1032LO01-F760 | 043 | 032 | 046 | 035 | 051 | 011 | 054 | 010 |
| MS_M103205H781-F760/M103202L719-SK1 | MS1032LO02-F760 | 044 | 033 | 047 | 036 | 051 | 011 | 054 | 010 |
| MS_M103205H781-F760/M103202L813-SK1 | MS1032LO03-F760 | 044 | 033 | 048 | 037 | 051 | 011 | 054 | 010 |
| MS_M103205H707-F760/M103202L802-SK1 | MS1032LO04-F760 | 045 | 034 | 049 | 038 | 051 | 011 | 054 | 010 |

TABLE 2b
HVR amino acid sequences of anti-latent myostatin antibodies (shown as SEQ ID NOs)

| | | Hyper Variable region (HVR) | | | | | |
|---|---|---|---|---|---|---|---|
| Antibody name | Abbreviation | H1 | H2 | H3 | L1 | L2 | L3 |
| MS_MST1032Ha-G1m/MST1032La-k0MC | MST1032-G1m | 055 | 058 | 061 | 065 | 070 | 073 |
| MS_MST1032Ha-F760/MST1032La-k0MC | MST1032-F760 | 055 | 058 | 061 | 065 | 070 | 073 |
| MS_M103205H000-SG1/M103202L000-SK1 | MS1032LO00-SG1 or Ab001 | 055 | 058 | 061 | 065 | 070 | 073 |
| MS_M103205H000-F760/M103202L000-SK1 | MS1032LO00-F760 | 055 | 058 | 061 | 065 | 070 | 073 |
| MS_M103205H714-SG1/M103202L861-SK1 | MS1032LO01-SG1 | 057 | 058 | 063 | 067 | 071 | 074 |
| MS_M103205H781-SG1/M103202L719-SK1 | MS1032LO02-SG1 | 057 | 060 | 063 | 066 | 072 | 073 |
| MS_M103205H781-SG1/M103202L813-SK1 | MS1032LO03-SG1 | 057 | 060 | 063 | 068 | 070 | 074 |
| MS_M103205H707-SG1/M103202L802-SK1 | MS1032LO04-SG1 | 056 | 058 | 063 | 069 | 071 | 073 |
| MS_M103205H714-F760/M103202L861-SK1 | MS1032LO01-F760 | 057 | 058 | 063 | 067 | 071 | 074 |
| MS_M103205H781-F760/M103202L719-SK1 | MS1032LO02-F760 | 057 | 060 | 063 | 066 | 072 | 073 |
| MS_M103205H781-F760/M103202L813-SK1 | MS1032LO03-F760 | 057 | 060 | 063 | 068 | 070 | 074 |
| MS_M103205H707-F760/M103202L802-SK1 | MS1032LO04-F760 | 056 | 058 | 063 | 069 | 071 | 073 |

then detected by anti-sheep IgG-HRP (Santa Cruz). The membrane was incubated with ECL substrate, and imaged using an ImageQuant LAS 4000 (GE Healthcare). As shown in FIG. 4, propeptide cleavage by BMP1 was inhibited by MST1032-Glm.

### Example 7

### Characterization of Anti-Latent Myostatin Antibody (BIACORE®)

[0593] The kinetic parameters of anti-latent myostatin antibodies against human, cynomolgus monkey (cyno), and mouse latent myostatin were assessed at 37° C. at pH7.4 using a BIACORE® T200 instrument (GE Healthcare). ProA/G (Pierce) was immobilized onto all flow cells of a CM4 chip using amine coupling kit (GE Healthcare). Anti-latent myostatin antibody and analytes were prepared in ACES pH7.4 (20 mM ACES, 150 mM NaCl, 1.2 mM CaCl₂, 0.05% Tween 20, 0.005% NaN₃). Antibody was captured onto the sensor surface by ProA/G. Antibody capture levels were typically 150 to 220 resonance units (RU). Then human, cyno, or mouse latent myostatin was injected at 3.125 to 50 nM prepared by two-fold serial dilution, followed by dissociation. The sensor surface was regenerated with 25 mM NaOH. Kinetic parameters were determined by processing and fitting the data to a 1:1 binding model using BIACORE® T200 Evaluation software, version 2.0 (GE Healthcare). The sensorgrams are shown in FIG. 5. Association rate (ka), dissociation rate (kd), and binding affinity (KD) are listed in Table 3. The kinetic parameters of MST1032-Glm toward human, cyno, and mouse latent myostatin were comparable.

TABLE 3
ka, kd, and KD of anti-latent myostatin antibody MST1032-G1m

| | ka (M⁻¹s⁻¹) | kd (s⁻¹) | KD (M) |
|---|---|---|---|
| Human latent myostatin | 1.13E+06 | 8.65E−05 | 7.66E−11 |
| Mouse latent myostatin | 1.41E+06 | 8.16E−05 | 5.79E−11 |
| Cyno latent myostatin | 1.09E+06 | 7.79E−05 | 7.17E−11 |

### Example 8

### In Vivo Efficacy of Anti-Latent Myostatin Antibody on Muscle Mass and Fat Mass

[0594] The in vivo efficacy of mAb MST1032-Glm was evaluated in mice. Anti-mature myostatin antibody 41C1E4 (as described in U.S. Pat. No. 7,632,499) was used as positive control in this study. To avoid potential immunomodulation due to a mouse anti-human antibody response, in vivo studies were performed in immune-deficient Severe Combined Immunodeficient (SCID) mice. Five-week-old SCID (C.B-17 SCID) mice (Charles River Laboratories Japan, Inc. (Kanagawa, JAPAN)) were treated with monoclonal antibodies at various doses or vehicle (PBS) given intravenously once per week for two weeks. On day 0, 7 and 14, full body lean mass and fat mass of the mice were assessed by nuclear magnetic resonance (NMR) (the minispec LF-50, Bruker Bio Spin, (Kanagawa, JAPAN)). The animals were euthanized on day 14, and the gastrocnemius and quadriceps muscles were dissected and weighed.

[0595] Statistical significance was determined by ANOVA, a Student's t-test and a Dunnett's test with JMP 9 software (SAS, Inc.). A p value of less than 0.05 was considered significant.

[0596] The results of this experiment are shown in FIGS. 6A-C. Both antibodies (MST1032-Glm and 41C1E4) increased lean body mass dose-dependently, and MST1032-Glm, when administered at 40 mg/kg, significantly decreased fat mass volume compared with the vehicle (PBS) group on day 14.

[0597] After two-week treatment, the antibodies administrated at 10 mg/kg and 40 mg/kg resulted in significant increment of quadriceps and gastrocnemius wet weight relative to the vehicle group.

### Example 9

### Comparison of In Vivo Efficacy of Various Myostatin Related Antibodies

[0598] All experimental settings for the comparison were the same as in Example 8. Various myostatin related antibodies, 41C1E4, REGN, OGD, and MYO-029 were tested in five-week-old SCID mice for two weeks. REGN, OGD, and MYO-029 are anti-mature myostatin antibodies described in WO 2011/150008 as H4H1657N2, WO 2013/186719 as OGD 1.0.0., and WO 2004/037861 as MYO-029, respectively. These antibodies were administrated intravenously once per week. Lean body mass and fat mass were examined by full-body NMR scanning on day 0 and 14. Grip strength was measured with a grip strength test meter (e.g., GPM-100B, MELQUEST Ltd., (Toyama, JAPAN)) on day 14. As shown in the results presented in FIGS. 7A-C, the lean body mass was increased by these antibodies except for MYO-029 (P>0.05). Grip strength of the MST1032-Glm-administered group was significantly increased relative to the vehicle (PBS) group, at 10 mg/kg (P<0.05). 41C1E4 and REGN also significantly increased grip strength compared with the vehicle (PBS). Full body fat mass tended to be reduced by 10 mg/kg of MST1032-Glm. Fat mass reduction efficacy of MST1032-Glm was stronger than that of other anti-mature myostatin antibodies.

### Example 10

### Humanization of Anti-Latent Myostatin Antibody

[0599] Amino acid residues of an antibody variable region are numbered according to Kabat (Kabat et al., Sequence of proteins of immunological interest, 5^{th} Ed., Public Health Service, National Institutes of Health, Bethesda, Md. (1991)).

[0600] Variable regions of the heavy and light chains for humanized MST1032 antibodies were designed. Some of the humanized MST1032 antibodies contain back mutation in framework region. The polynucleotides of the designed heavy and light chain variable regions were synthesised by GenScript Inc., and were cloned into expression vectors containing the heavy chain constant region SG1 sequence (SEQ ID NO: 52 (the amino acid sequence is shown in SEQ ID NO: 9)) and the light chain constant region SK1 sequence (SEQ ID NO: 54 (the amino acid sequence is shown in SEQ ID NO: 10)), respectively. Humanized antibodies were transiently expressed in FS293-F cells, and HEK Blue Assay and BIACORE® analysis were carried out as described above. As shown in FIG. 8 and Table 4, and compared to FIGS. 1 and 2, humanized antibody (MS1032LO00-SG1) showed comparable inhibition activity and affinity to chimeric antibody (MST1032-Glm).

TABLE 4
Kinetic parameters of humanized anti-latent myostatin antibody

| | ka (M⁻¹s⁻¹) | kd (s⁻¹) | KD (M) |
|---|---|---|---|
| MST1032-G1m | 1.13E+06 | 8.65E−05 | 7.66E−11 |
| MS1032LO00-SG1 | 1.27E+06 | 9.52E−05 | 7.50E−11 |

### Example 11

### Generation of pH-Dependent Anti-Latent Myostatin Antibody

[0601] To generate pH-dependent anti-latent myostatin antibodies, histidine scanning mutagenesis was conducted for all CDRs of mAb MS1032LO00-SG1. Each amino acid in the CDRs was individually mutated to histidine using In-Fusion HD Cloning Kit (Clontech Inc. or Takara Bio company) according to the manufacturer's instructions. After confirming through sequencing that each variant was mutated correctly, variants were transiently expressed and purified by the method described above. All histidine-substituted variants were evaluated by a modified BIACORE® assay as compared to that described above. Briefly, an additional dissociation phase at pH5.8 was integrated into the BIACORE® assay immediately after the dissociation phase at pH7.4. This is to assess the pH-dependent dissociation between antibody (Ab) and antigen (Ag) from the complexes formed at pH7.4 as opposed to the corresponding dissociation at pH5.8. The dissociation rate at pH5.8 buffer was determined by processing and fitting data using the Scrubber 2.0 (BioLogic Software) curve fitting software.

[0602] As shown in FIG. 9, the parental antibody (Ab001) showed no reduction in binding response at pH5.8 compared to the pH7.4 dissociation phase. Several of the single-histidine substitutions resulted in a moderate to strong reduction in binding response at pH5.8 compared to the pH7.4 dissociation phase. The dissociation rate at pH5.8 for each of the single-histidine substitution variants are shown in Table 5. As shown in Table 5, Ab002 showed the fastest Ab/Ag complex dissociation rate at pH5.8, more than 200 fold faster than parental antibody (Ab001). Antibodies with a combination of these mutations in the CDRs were then generated. The CDR sequences of the antibodies containing these various mutations are shown in Table 6.

### Example 12

### Affinity Improvement of pH-Dependent Anti-Latent Myostatin Antibody

[0603] To identify mutations which improve affinity at pH7.4 and/or in vitro inhibition activity, more than 500 variants were generated for heavy and light chain respectively, using at least one variant generated in Example 11 as a template. These variants had each amino acid in the CDRs substituted with 18 other amino acids, excluding the original amino acid and Cysteine. The binding ability of variants to human latent myostatin was assessed at 37° C. under pH7.4 using BIACORE® 4000 instrument (GE Healthcare). Culture supernatant containing variants in FS293-F cells was prepared with ACES pH7.4 buffer containing 10 mg/ml BSA and 0.1 mg/ml carboxymethyl dextran (CMD). Each antibody was captured onto the flow cells until the capture level reached around 200 RU. Then 25 nM human latent myostatin was injected over the flow cells. An additional dissociation phase at pH5.8 was integrated into the BIACORE® assay immediately after

TABLE 5
pH 5.8 dissociation rate for single histidine
substituted anti-latent myostatin antibodies

| Name of variable region | | | |
|---|---|---|---|
| Heavy chain | Light chain | Abbreviation | kd (1/s) |
| M103205H000 | M103202L000 | Ab001 | 2.92E−05 |
| M103205H001 | M103202L000 | Ab002 | 6.09E−03 |
| M103205H009 | M103202L000 | Ab003 | 8.80E−04 |
| M103205H026 | M103202L000 | Ab004 | 1.86E−04 |
| M103205H028 | M103202L000 | Ab005 | 7.63E−05 |
| M103205H000 | M103202L008 | Ab006 | 6.58E−05 |
| M103205H028 | M103202L008 | Ab007 | 4.15E−04 |

TABLE 6
CDR sequences and their SEQ ID NOs of histidine substituted anti-latent myostatin antibodies
Heavy Chain

| | | Hyper Variable | | | | | | | | | | | | | | | | |
|---|---|---|---|---|---|---|---|---|---|---|---|---|---|---|---|---|---|---|
| | | region (HVR) | | | Kabat No. | | | | | | | | | | | | | |
| Antibody name | Variable region | H1 | H2 | H3 | 31 | 32 | 33 | 34 | 35 | 50 | 51 | 52 | 53 | 54 | 55 | 56 | 57 | 58 |
| M103205H000 | 015 | 055 | 058 | 061 | S | V | O | I | S | I | I | S | Y | A | G | S | T | V |
| M103205H001 | 016 | 056 | 058 | 061 | H | V | O | I | S | I | I | S | Y | A | G | S | T | V |
| M103205H009 | 017 | 055 | 059 | 061 | S | V | O | I | S | I | I | S | H | A | G | S | T | V |
| M103205H006 | 018 | 055 | 058 | 062 | S | V | O | I | S | I | I | S | Y | A | G | S | T | V |
| M103205H008 | 019 | 055 | 058 | 063 | S | V | O | I | S | I | I | S | Y | A | G | S | T | V |
| M103205H033 | 020 | 056 | 059 | 061 | H | V | O | I | S | I | I | S | H | A | G | S | T | V |
| M103205H034 | 021 | 059 | 059 | 062 | S | V | O | I | S | I | I | S | H | A | G | S | T | V |
| M103205H035 | 022 | 058 | 058 | 062 | H | V | O | I | S | I | I | S | Y | A | G | S | T | V |
| M103205H036 | 023 | 056 | 059 | 062 | H | V | O | I | S | I | I | S | H | A | G | S | T | V |
| M103205H707 | 024 | 055 | 058 | 063 | H | V | O | I | S | I | I | S | Y | A | G | S | T | V |
| M103205H708 | 025 | 055 | 059 | 063 | S | V | O | I | S | I | I | S | H | A | G | S | T | V |
| M103205H709 | 026 | 055 | 058 | 064 | S | V | O | I | S | I | I | S | Y | A | G | S | T | V |
| M103205H710 | 027 | 066 | 059 | 063 | H | V | O | I | S | I | I | S | H | A | G | S | T | V |
| M103205H711 | 028 | 065 | 059 | 064 | S | V | O | I | S | I | I | S | H | A | G | S | T | V |
| M103205H712 | 029 | 066 | 058 | 064 | H | V | O | I | S | I | I | S | Y | A | G | S | T | V |
| M103205H713 | 030 | 056 | 056 | 064 | H | V | O | I | S | I | I | S | H | A | G | S | T | V |

Heavy Chain

| | Kabat No. | | | | | | | | | | | | | | | | | |
|---|---|---|---|---|---|---|---|---|---|---|---|---|---|---|---|---|---|---|
| Antibody name | 59 | 60 | 61 | 62 | 63 | 64 | 65 | 95 | 96 | 97 | 98 | 99 | 100 | 100a | 100b | 100c | 101 | 102 |
| M103205H000 | Y | A | S | W | A | K | G | G | V | P | A | Y | S | T | G | G | O | L |
| M103205H001 | Y | A | S | W | A | K | G | G | V | P | A | Y | S | T | G | G | O | L |
| M103205H009 | Y | A | S | W | A | K | G | G | V | P | A | Y | S | T | G | G | O | L |
| M103205H006 | Y | A | S | W | A | K | G | G | V | P | A | H | S | T | G | G | O | L |
| M103205H008 | Y | A | S | W | A | K | G | G | V | P | A | Y | S | H | G | G | O | L |
| M103205H033 | Y | A | S | W | A | K | G | G | V | P | A | Y | S | T | G | G | O | L |
| M103205H034 | Y | A | S | W | A | K | G | G | V | P | A | H | S | T | G | G | O | L |
| M103205H035 | Y | A | S | W | A | K | G | G | V | P | A | H | S | T | G | G | O | L |
| M103205H036 | Y | A | S | W | A | K | G | G | V | P | A | H | S | T | G | G | O | L |
| M103205H707 | Y | A | S | W | A | K | G | G | V | P | A | Y | S | H | G | G | O | L |
| M103205H708 | Y | A | S | W | A | K | G | G | V | P | A | Y | S | H | G | G | O | L |
| M103205H709 | Y | A | S | W | A | K | G | G | V | P | A | H | S | H | G | G | O | L |
| M103205H710 | Y | A | S | W | A | K | G | G | V | P | A | Y | S | H | G | G | O | L |
| M103205H711 | Y | A | S | W | A | K | G | G | V | P | A | H | S | H | G | G | O | L |
| M103205H712 | Y | A | S | W | A | K | G | G | V | P | A | H | S | H | G | G | O | L |
| M103205H713 | Y | A | S | W | A | K | G | G | V | P | A | H | S | H | G | G | O | L |

Light Chain

| | | Hyper Variable | | | | | | | | | | | | | | |
|---|---|---|---|---|---|---|---|---|---|---|---|---|---|---|---|---|
| | | region (HVR) | | | Kabat No. | | | | | | | | | | | |
| Antibody name | Variable region | L1 | L2 | L3 | 24 | 25 | 26 | 27 | 27a | 27b | 28 | 29 | 30 | 31 | 32 | 33 |
| M103202L003 | 015 | 065 | 070 | 075 | Q | S | S | Q | S | V | V | O | N | N | W | L |
| M103202L008 | 091 | 066 | 070 | 073 | Q | S | S | Q | S | V | V | H | N | N | W | L |

Light Chain

| | Kabat No. | | | | | | | | | | | | | | | | | |
|---|---|---|---|---|---|---|---|---|---|---|---|---|---|---|---|---|---|---|
| Antibody name | 34 | 50 | 51 | 52 | 53 | 54 | 55 | 56 | 89 | 90 | 91 | 92 | 93 | 94 | 95 | 95a | 96 | 97 |
| M103202L003 | S | W | A | S | T | L | A | S | A | G | G | Y | G | G | G | L | Y | A |
| M103202L008 | S | W | A | S | T | L | A | S | A | G | G | Y | G | G | G | L | Y | A |

the dissociation phase at pH7.4. This additional dissociation phase assesses the pH-dependent dissociation between antibody (Ab) and antigen (Ag) from the complexes formed at pH7.4. The flow cell surface was regenerated with 25 mM NaOH. Kinetic parameters were determined using BIACORE® 4000 Evaluation software, version 2.0 (GE Healthcare). Analysis of additional dissociation at pH5.8 was performed using Scrubber2 (BioLogic Software).

[0604] Variants with improved affinity at pH7.4 and/or in vitro inhibition activity were selected, and combined with mutations improving pH dependency identified in Example 11. After combination of these mutations, four variants (MS1032LO01, 02, 03, and 04) were selected, and transiently expressed in SG1 or F760 (SEQ ID NO: 11 and 51) for BIACORE® binding kinetic analysis, in vitro and/or in vivo assays. Both SG1 and F760 are human heavy chain constant regions. The binding affinities of SG1 against human FcγRs are comparable to that for the natural IgG constant region, but that of F760 is abolished by Fc modification (also described herein as silent Fc). Amino acid and nucleotide sequences of the four anti-myostatin variants are shown in Table 2a.

### Example 13

### Characterization of pH-Dependent MS1032 Variants (HEK Blue Assay (BMP1 and Spontaneous Activation))

[0605] All experimental settings were the same in Examples 3 and 4. As shown in FIG. 10, all variants showed comparable inhibition activity against human latent myostatin to MS1032LO00-SG1.

### Example 14

### Characterization of pH-Dependent MS1032 Variants (BIACORE®)

[0606] All experimental settings were the same as in Example 7, except that measurements were also performed in ACES pH5.8 buffer in addition to ACES pH7.4 condition. Some antibodies were only measured against human latent myostatin. Antibody capture level was aimed at 185 RU and 18.5 RU, for avidity and affinity assay, respectively. Kinetic parameters were determined using 1:1 Binding fitting using BIACORE® T200 Evaluation software, version 2.0 (GE Healthcare). The sensorgrams of all antibodies against human latent myostatin with avidity condition are shown in FIG. 11, and ka, kd, and KB calculated from different conditions are listed in Tables 7-10. Under the avidity condition, all antibodies except MS1032LO0-SG1 showed a faster dissociation rate under acidic pH than neutral pH. Under the affinity condition, all antibodies except M S132LO00-SG1 showed a weak interaction with latent myostatin under acidic pH and therefore, kinetic parameters were not determined.

TABLE 7
ka, kd, and KD of avidity condition assay under neutral pH

| | Human latent myostatin | | | Mouse latent myostatin | | | Cyno latent myoststin | | |
|---|---|---|---|---|---|---|---|---|---|
| | ka (M⁻¹s⁻¹) | kd (s⁻¹) | KD (M) | ka (M⁻¹s⁻¹) | kd (s⁻¹) | KD (M) | ka (M⁻¹s⁻¹) | kd (s⁻¹) | KD (M) |
| MS1032LO00-SG1 | 1.27E+06 | 9.52E−05 | 7.50E−11 | 1.52E+06 | 7.18E−05 | 4.71E−11 | 1.21E−06 | 8.08E−05 | 6.66E−11 |
| MS1032LO01-SG1 | 1.27E+06 | 2.16E−04 | 1.70E−10 | 1.45E+06 | 2.17E+04 | 1.49E−10 | 1.19E+06 | 1.97E−04 | 1.65E−10 |
| MS1032LO02-SG1 | 8.36E+05 | 2.49E−04 | 2.98E−10 | N/T | N/T | N/T | N/T | N/T | N/T |
| MS1032LO03-SG1 | 9.81E+05 | 1.92E−04 | 1.96E−10 | N/T | N/T | N/T | N/T | N/T | N/T |
| MS1032LO04-SG1 | 1.33E+06 | 2.17E−04 | 1.63E−10 | N/T | N/T | N/T | N/T | N/T | N/T |

N/T: not tested

TABLE 8
ka, kd, and KD of avidity condition assay under acidic pH

| | Human latent myostatin | | | Mouse latent myostatin | | | Cyno latent myostatin | | |
|---|---|---|---|---|---|---|---|---|---|
| | ka (M⁻¹s⁻¹) | kd (s⁻¹) | KD (M) | ka (M⁻¹s⁻¹) | kd (s⁻¹) | KD (M) | ka (M⁻¹s⁻¹) | kd (s⁻¹) | KD (M) |
| MS1032LO00-SG1 | 1.60E+06 | 1.28E−04 | 7.97E−11 | 2.32E+06 | 2.02E−05 | 8.70E−12 | 1.79E+06 | 1.58E−05 | 8.83E−12 |
| MS1032LO01-SG1 | 1.22E+06 | 2.42E−02 | 1.99E−08 | 1.02E+06 | 6.25E−03 | 6.15E−09 | 7.64E+05 | 6.80E−03 | 8.90E−09 |
| MS1032LO02-SG1 | 1.70E+06 | 4.14E−02 | 2.43E−08 | N/T | N/T | N/T | N/T | N/T | N/T |
| MS1032LO03-SG1 | 5.43E+05 | 5.24E−03 | 9.66E−09 | N/T | N/T | N/T | N/T | N/T | N/T |
| MS1032LO04-SG1 | 7.81E+05 | 7.13E−03 | 9.13E−09 | N/T | N/T | N/T | N/T | N/T | N/T |

N/T: not tested

TABLE 9
ka, kd, and KD of affinity condition assay under nentral pH

| | Human latent myostatin | | | Mouse latent myostatin | | | Cyno latent myostatin | | |
|---|---|---|---|---|---|---|---|---|---|
| | ka (M⁻¹s⁻¹) | kd (s⁻¹) | KD (M) | ka (M⁻¹s⁻¹) | kd (s⁻¹) | KD (M) | ka (M⁻¹s⁻¹) | kd (s⁻¹) | KD (M) |
| MS1032LO00-SG1 | 1.07E+06 | 2.45E−04 | 2.30E−10 | 1.31E+06 | 1.60E−04 | 1.22E−10 | 1.02E+06 | 2.13E−04 | 2.09E−10 |
| MS1032LO01-SG1 | 1.64E+36 | 1.29E−03 | 7.88E−10 | 1.50E+06 | 1.07E−03 | 7.13E−10 | 1.15E+06 | 1.10E−03 | 9.54E−10 |
| MS1032LO02-SG1 | 1.09E+06 | 1.79E−03 | 1.64E−09 | N/T | N/T | N/T | N/T | N/T | N/T |
| MS1032LO03-SG1 | 1.08E+06 | 1.17E−03 | 1.08E−09 | N/T | N/T | N/T | N/T | N/T | N/T |
| MS1032LO04-SG1 | 1.54E+06 | 1.25E−03 | 8.12E−10 | N/T | N/T | N/T | N/T | N/T | N/T |

N/T: not tested

TABLE 10
ka, kd, and KD affinity condition assay under acidic pH

| | Human latent myostatin | | | Mouse latent myostatin | | | Cyno latent myostatin | | |
|---|---|---|---|---|---|---|---|---|---|
| | ka (M⁻¹s⁻¹) | kd (s⁻¹) | KD (M) | ka (M⁻¹s⁻¹) | kd (s⁻¹) | KD (M) | ka (M⁻¹s⁻¹) | kd (s⁻¹) | KD (M) |
| MS1032LO00-SG1 | 1.09E+06 | 2.35E−04 | 2.15E−10 | 1.62E+06 | 7.08E−05 | 4.38E−11 | 1.41E+06 | 1.96E−04 | 1.39E−10 |
| MS1032LO01-SG1 | n.d. | n.d. | n.d. | n.d. | n.d. | n.d. | n.d. | n.d. | n.d. |
| MS1032LO02-SG1 | n.d. | n.d. | n.d. | N/T | N/T | N/T | N/T | N/T | N/T |
| MS1032LO03-SG1 | n.d. | n.d. | n.d. | N/T | N/T | N/T | N/T | N/T | N/T |
| MS1032LO04-SG1 | n.d. | n.d. | n.d. | N/T | N/T | N/T | N/T | N/T | N/T |

n.d.: not determined,
N/T: not tested

### Example 15

### Comparison of Plasma Total Myostatin Concentration Between Antibodies with FcγR Binding and an Abolished FcγR Binding in Mice

### In Vivo Test Using C.B-17 SCID Mice

[0607] The accumulation of endogenous myostatin was assessed in vivo upon administration of anti-latent myostatin antibody in C.B-17 SCID mice (In Vivos, Singapore). An anti-latent myostatin antibody (3 mg/ml) was administered at a single dose of 10 ml/kg into the caudal vein. Blood was collected 5 minutes, 7 hours, 1 day, 2 days, 3 days, 7 days, 14 days, 21 days, and 28 days after administration. The collected blood was centrifuged immediately at 14,000 rpm in 4′C for 10 minutes to separate the plasma. The separated plasma was stored at or below −80° C. until measurement. The anti-latent myostatin antibodies used were MS1032LO00-SG1 and MS1032LO00-F760.

### Measurement of Total Myostatin Concentration in Plasma by Electrochemiluminescence (ECL)

[0608] The concentration of total myostatin in mouse plasma was measured by ECL.

[0609] Anti-mature myostatin-immobilized plates were prepared by dispensing anti-mature myostatin antibody RK35 (as described in WO 2009/058346) onto a MULTI-ARRAY 96-well plate (Meso Scale Discovery) and incubated overnight at 4° C. Mature myostatin calibration curve samples and mouse plasma samples diluted 40-fold or more were prepared. The samples were mixed in an acidic solution (0.2 M Glycine-HCl, pH2.5) to dissociate mature myostatin from its binding protein (such as propeptide). Subsequently, the samples were added onto an anti-mature myostatin-immobilized plate, and allowed to bind for 1 hour at room temperature before washing. Next, SULFO TAG labelled anti-mature myostatin antibody RK22 (as described in WO 2009/058346) was added and the plate was incubated for 1 hour at room temperature before washing. Read Buffer T (×4) (Meso Scale Discovery) was immediately added to the plate and signal was detected by SECTOR Imager 2400 (Meso Scale Discovery). The mature myostatin concentration was calculated based on the response of the calibration curve using the analytical software SOFTmax PRO (Molecular Devices). The time course of total myostatin concentration in plasma after intravenous administration of anti-latent myostatin antibody measured by this method is shown in FIG. 12.

### Effect of FcγR Binding on Myostatin Accumulation In Vivo

[0610] Alter administration of antibody MS1032LO00-F760, the plasma total myostatin concentration at day 28 accumulated 248 fold compared to plasma total myostatin concentration at 5 minutes. In contrast, after administration of MS1032LO00-SG1, plasma total myostatin concentration at day 28 accumulated 37 fold compared to plasma total myostatin concentration at 5 minutes. An approximately 7 fold difference of plasma total myostatin concentration at day28 was observed between MS1032LO00-F760 (silent Fc) and MS1032LO0-SG1 due to FcγR binding. In human soluble IL-6R (hsIL-6R), no significant difference in plasma hsIL-6R concentration was observed between anti-hsIL-6R antibody-F760 (silent Fc) and -SG1 as described in WO 2013/125667. Since hsIL-6R is a monomeric antigen, antibody-hsIL-6R complex contains only 1 Fc. Therefore, the result in WO 2013/125667 suggested that an antibody-antigen complex with 1 Fc has no significant binding to FcγR in vivo to accelerate the uptake of immune complex by cells. On the other hand, a multimeric antigen (such as myostatin), antibody can make a large immune complex and the antibody-antigen complex contains more than 2 Fc. Therefore, a significant difference in plasma antigen concentration can be observed between F760 and SG1 due to strong avidity binding against FcγR. The result suggests that MST1032 can form a large immune complex which contains more than 2 antibodies with myostatin.

### Example 16

### Comparison of Plasma Total Myostatin Concentration Between Non-pH Dependent Anti-Latent Myostatin Antibody and pH-Dependent Anti-Latent Myostatin Antibody in Mice

### In Vivo Test Using C.B-17 SCID Mice

[0611] The in vivo accumulation of endogenous mouse myostatin was assessed after administering anti-latent myostatin antibody in C.B-17 SCID mice (In Vivos, Singapore) as described in Example 15. The anti-latent myostatin antibodies used were MS1032LO01 I-SG1 and MS1032LO01-F760.

### Measurement of Total Myostatin Concentration in Plasma by ECL

[0612] The concentration of total myostatin in mouse plasma was measured by ECL as described in Example 15. The time course of plasma total myostatin concentration after intravenous administration of anti-latent myostatin antibody as measured by this method is shown in FIG. 13.

Effect of pH-Dependent Myostatin Binding on Myostatin Accumulation In Vivo

[0613] The pH-dependent anti-latent myostatin antibodies (MS1032LO01-SG1 and MS1032LO01-F760) were tested in vivo and comparison of plasma total myostatin concentration was made. The total myostatin concentration measurement results after administration of MS1032LO00-SG1 and MS1032LO00-F760 described in Example 15 are also shown in FIG. 13. MS1032LO00 is non pH-dependent antibody and MS1032LO01 is pH-dependent antibody. As shown in FIG. 13, total myostatin concentration after administration of MS1032LO01-F760 was reduced compared to MS1032LO00-F760 due to pH-dependent binding. Moreover, total myostatin concentration after administration of MS1032LO01-SG1 was dramatically reduced compared to that of MS1032LO00-SG1 due to pH-dependent binding and increased cellular uptake by FcγR binding. It is expected that MS1032LO01-SG1 has a superior property of enhancing myostatin clearance from plasma as a “sweeping antibody”.

### Example 17

### In Vivo Efficacy of pH-Dependent Anti-Latent Myostatin Antibody

[0614] All experimental settings were the same as in Example 8. As shown in FIG. 14, when administrated intravenously to SCID mice at doses of 0.2, 1, and 5 mg/kg, MS1032LO00-SG1 (non-sweeping antibody) and MS1032LO0 I-SG1 (sweeping antibody) increased skeletal muscle mass dose-dependently after 2 weeks. MS1032LO01-SG1 significantly increased quadriceps wet weight and grip strength at 1 and 5 mg/kg, and increased lean body mass and gastrocnemius wet weight at 5 mg/kg relative to the vehicle group (PBS). MS1032LO01-SG1 also significantly decreased fat mass at 1 and 5 mg/kg relative to the vehicle group (PBS). MS1032LO00-SG1 showed no increase in lean body mass at 0.2 mg/kg. On the other hand, MS1032LO01-SG1 drastically increased lean body mass, quadriceps wet weight, gastrocnemius wet weight and grip strength at 0.2 mg/kg. Hence, a pH-dependent binding antibody shows greater muscle mass growth and muscle power improvement relative to a non pH-dependent binding antibody.

### Example 18

### Expression and Purification of Human and Mouse Latent GDF11

[0615] Human GDF11 with Flag-tag on N-terminus (also described herein as Flag-hGDF11, human latent GDF11, hGDF11, or human GDF11, SEQ ID NO: 85) were expressed transiently using FreeStyle293-F cells (Thermo Fisher). Conditioned media expressing Flag-hGDF11 was applied to a column packed with anti-Flag M2 affinity resin (Sigma) and eluted with Flag peptide (Sigma). Fractions containing Flag-hGDF11 were collected and subsequently subjected to a Superdex 200 gel filtration column (GE healthcare) equilibrated with 1×PBS. Fractions containing the Flag-hGDF11 were then pooled and stored at −80° C.

### Example 19

### Characterization of Anti-Latent Myostatin Antibody (ELISA)

[0616] Uncoated ELISA plates (NUNC-IMMUNO plate MAXISORP surface, Nalge Nunc International) were coated with 20 μL of 50 nM streptavidin (GenScript) for 2 hour at room temperature. Plates were then washed with PBST three times and blocked with 50 μL 20% Blocking One (Nacalai Tesque) for overnight. On the next day, each well of the plates was incubated with biotinylated human latent myostatin at 2 nM/well/20 μL or biotinylated human latent GDF11 at 20 nM/well/20 μL for 2 hours. After washing, 20 μL of antibody sample was added to the wells and the plates were left for 1 hour. The plates were washed and 20 L of anti-human IgG-horseradish peroxidase (HRP) (Abcam) diluted in HEPES-buffered saline was added, and the plates were left for another hour. The wells were washed again, and then 50 μL ABTS (KPL) was added to each well, and the plates were incubated for 1 hour. The signal was detected at 405 nm in a colorimetric plate reader. The results of the binding experiment are shown in FIG. 15. MST1032-Glm bound to latent myostatin (i.e., non-covalent complex of mature myostatin and propeptides), but didn't bind to hGDF11. These results show that MST1032-Glm specifically binds to myostatin, not to hGDF11.

### Example 20

### Characterization of Anti-Latent Myostatin Antibody (HEK Blue Assay (BMP1 and Spontaneous Activation))

[0617] A reporter gene assay was used to assess the biological activity of active GDF11 in vitro. HEK-Blue™ TGF-β cells (Invivogen) that express a Smad3/4-binding element (SBE)-inducible SEAP reporter gene, allow the detection of bioactive GDF11 by monitoring the activation of the activin type 1 and type 2 receptors. Active GDF11 stimulates the production and secretion of SEAP into the cell supernatant. The quantity of SEAP secreted is then assessed using QUANTIBlue™ (Invivogen).

[0618] HEK-Blue™ TGF-β cells were maintained in DMEM medium (Gibco) supplemented with 10% fetal bovine serum, 50 μg/mL streptomycin, 50 U/mL penicillin, 100 μg/mL Normocin™, 30 μg/mL of Blasticidin, 2001 μg/mL of HygroGold™ and 100 μg/mL of Zeocin™. During the functional assay, cells were changed to assay medium (DMEM with 0.1% bovine serum albumin, streptomycin, penicillin and Normocin™) and seeded to a 96-well plate. Human GDF11 was incubated with or without recombinant human BMP1 (Calbiochem) and anti-latent antibody (MST1032-Glm) at 37° C. overnight. The sample mixtures were transferred to cells. After 24-hour incubation, the cell supernatant was mixed with QUANTIBlue™ and the optical density at 620 nm was measured in a colorimetric plate reader. As shown as FIG. 16, MST1032-Glm did not prevent protease-mediated or spontaneous activation of human GDF11 and thus failed to inhibit the secretion of SEAP.

### Example 21

### Further Optimization of MS1032 Variants to Enhance the Sweeping Effect

[0619] As the pH dependent antibody, MS1032LO01-SG1, showed superior efficacy in mouse, further optimization was conducted to increase pH dependency, to enhance up-take into cells, to increase stability, and so on by introducing mutations into the antibody CDRs or by changing framework regions. More than a thousand variants were assessed in a BIACORE® and/or HEK Blue Assay as described above, and MS1032LO06-SG1, MS1032LO07-SG1, MS1032LO10-SG1, MS1032LO11-SG1, MS1032LO12-SG1, MS1032LO18-SG1, MS1032LO19-SG1, MS1032LO21-SG1, MS1032LO23-SG1, MS1032LO24-SG1, MS1032LO25-SG1, and MS1032LO26-SG1 were generated. Their amino acid and nucleotide sequences of these generate antibodies are shown in Table 11.

[0620] The affinity of MS1032 variant binding to human, cynomolgus monkey (cyno), or mouse latent myostatin at pH7.4 and pH5.8 was determined at 37° C. using BIACORE® T200 instrument (GE Healthcare) to assess the effect of pH on antigen binding. ProA/G (Pierce) was immobilized onto all flow cells of a CM4 chip using an amine coupling kit (GE Healthcare). All antibodies and analytes were prepared in ACES pH7.4 or pH5.8 buffer containing 20 mM ACES, 150 mM NaCl, 1.2 mM CaCl₂, 0.05% Tween 20, 0.005% NaN₃. Each antibody was captured onto the sensor surface by proA/G. Antibody capture levels were typically 130 to 240 resonance units (RU). Human, cyno, and mouse latent myostatin was injected at 3.125 to 50 nM prepared by two-fold serial dilution, followed by dissociation. The sensor surface was regenerated each cycle with 10 mM Glycine HCl pH1.5. Binding affinity was determined by processing and fitting the data to a 1:1 binding model using BIACORE® T200 Evaluation software, version 2.0 (GE Healthcare).

[0621] The affinity (KD) of MS1032 variants binding to human, cynomolgus monkey (cyno), and mouse latent myostatin at pH7.4 and pH5.8 are shown in Table 12. All variants showed a KD ratio ((KD at pH5.8)/(KD at pH7.4)) of over 5, indicating pH dependent binding to latent myostatin

### Example 22

### Evaluation of the Neutralization Activity of Further Optimized Variants in HEK Blue Assay

[0622] We evaluated the neutralization activity of MS1032LO06-SG1, MS1032LO07-SG1, MS1032LO10-SG1, MS1032LO11-SG1, MS1032LO12-SG1, MS1032LO18-SG1, MS1032LO19-SG1, MS1032LO21-SG1, MS1032LO23-SG1 and MS1032LO25-SG1 against human latent myostatin as described in Example 3. As shown in FIG. 17, all variants showed comparable activity to MS1032LO01-SG1.

### Example 23

### Comparison of Plasma Total Myostatin Concentration Between Non-pH Dependent Anti-Latent Myostatin Antibody and Different pH-Dependent Anti-Latent Myostatin Antibodies in Mice

[0623] In Vivo Test Using C.B-17 SCID Mice

The accumulation of endogenous myostatin was assessed in vivo upon administration of anti-latent myostatin antibody in C.B-17 SCID mice (In Vivos,

TABLE 11a
MS1032 variants and their DNA and amino acid sequences (shown as SEQ ID NOs)

| | | Variable region | | | | Constant region | | | |
|---|---|---|---|---|---|---|---|---|---|
| | | Heavy | | Light | | Heavy | | Light | |
| Antibody name | Abbreviation | DNA | PROTEIN | DNA | PROTEIN | DNA | PROTEIN | DNA | PROTEIN |
| MS_M103205H795-SG1/M103202L889-SK1 | MS1032LO06-SG1 | 100 | 86 | 110 | 96 | 052 | 009 | 054 | 010 |
| MS_M103205H1004-SG1/M103202L889-SK1 | MS1032LO07-SG1 | 101 | 87 | 110 | 96 | 052 | 009 | 054 | 010 |
| MS_M103205H1046-SG1/M103202L889-SK1 | Ms1032LO10-SG1 | 102 | 88 | 110 | 96 | 052 | 009 | 054 | 010 |
| MS_M103205H1047-SG1/M103202L889-SK1 | MS1032LO11-SG1 | 103 | 89 | 110 | 96 | 052 | 009 | 054 | 010 |
| MS_M103205H1057-SG1/M103202L889-SK1 | MS1032LO12-SG1 | 104 | 90 | 110 | 95 | 052 | 009 | 054 | 010 |
| MS_M103205H1186-SG1/M103202L889-SK1 | MS1032LO18-SG1 | 105 | 91 | 110 | 96 | 052 | 009 | 054 | 010 |
| MS_M103240H795-SG1/M103202L1045-SK1 | MS1032LO19-SG1 | 106 | 92 | 111 | 97 | 052 | 009 | 054 | 010 |
| MS_M103245H795-SG1/M103202L1045-SK1 | MS1032LO21-SG1 | 107 | 93 | 111 | 97 | 052 | 009 | 054 | 010 |
| MS_M103245H1233-SG1/M103202L1045-SK1 | MS1032LO23-SG1 | 108 | 94 | 111 | 97 | 052 | 009 | 054 | 010 |
| MS_M103205H795-SG1/M103202L1060-SK1 | MS1032LO24-SG1 | 100 | 86 | 112 | 98 | 052 | 009 | 054 | 010 |
| MS_M103240H1246-SG1/M103202L1045-SK1 | MS1032LO25-SG1 | 109 | 95 | 111 | 97 | 052 | 009 | 054 | 010 |
| MS_M103240H795-SG1/M103209L1045-SK1 | MS1032LO26-SG1 | 106 | 92 | 113 | 99 | 052 | 009 | 054 | 010 |

TABLE 11b
HVR amino acid sequences of MS1032 variants (shown as SEQ ID NOs)

| | | Hyper Variable region (HVR) | | | | | |
|---|---|---|---|---|---|---|---|
| Antibody name | Abbreviation | H1 | H2 | H3 | L1 | L2 | L3 |
| MS_M103205H795-SG1/M103202L889-SK1 | MS1032LO06-SG1 | 114 | 58 | 63 | 122 | 71 | 74 |
| MS_M103205H1004-SG1/M103202L889-SK1 | MS1032LO07-SG1 | 114 | 116 | 121 | 122 | 71 | 74 |
| MS_M103205H1046-SG1/M103202L889-SK1 | MS1032LO10-SG1 | 57 | 117 | 63 | 122 | 71 | 74 |
| MS_M103205H1047-SG1/M103202L889-SK1 | MS1032LO11-SG1 | 57 | 118 | 63 | 122 | 71 | 74 |
| MS_M103205H1057-SG1/M103202L889-SK1 | MS1032LO12-SG1 | 57 | 119 | 63 | 122 | 71 | 74 |
| MS_M103205H1186-SG1/M103202L889-SK1 | MS1032LO18-SG1 | 114 | 118 | 63 | 122 | 71 | 74 |
| MS_M103240H795-SG1/M103202L1045-SK1 | MS1032LO19-SG1 | 114 | 58 | 63 | 123 | 71 | 74 |
| MS_M103245H795-SG1/M103202L1045-SK1 | MS1032LO21-SG1 | 114 | 58 | 63 | 123 | 71 | 74 |
| MS_M103245H1233-SG1/M103202L1045-SK1 | MS1032LO23-SG1 | 115 | 58 | 63 | 123 | 71 | 74 |
| MS_M103205H795-SG1/M103202L1060-SK1 | MS1032LO24-SG1 | 114 | 58 | 63 | 124 | 125 | 74 |
| MS_M103240H1246-SG1/M103202L1045-SK1 | MS1032LO25-SG1 | 115 | 120 | 63 | 123 | 71 | 74 |
| MS_M103240H795-SG1/M103209L1045-SK1 | MS1032LO26-SG1 | 114 | 58 | 63 | 123 | 71 | 74 |

TABLE 12
Kinetic parameters of MS1032 variants

| | | | Human latent myostatin | | |
|---|---|---|---|---|---|
| | | | | | ratio of |
| | Name of variable region | | KD pH | KD pH | KD at pH |
| Ab name | Heavy chain | Light chain | 7.4 (M) | 5.8 (M) | 5.8/pH 7.4 |
| MS1032LO06-5G1 | M103205H795 | M103202L889 | 2.85E−10 | 3.40E−08 | 119 |
| MS1032LO07-SG1 | M103205H1004 | M103202L889 | 2.75E−10 | 4.62E−08 | 168 |
| MS1032LO10-SG1 | M103205H1046 | M103202L889 | 3.51E−10 | 4.38E−08 | 125 |
| MS1032LO11-SG1 | M103205H1047 | M103202L889 | 4.19E−10 | 1.43E−07 | 341 |
| MS1032LO12-SG1 | M103205H1057 | M103202L889 | 4.07E−10 | 8.49E−08 | 209 |
| MS1032LO18-SG1 | M103205H1186 | M103202L889 | 3.29E−10 | n.d. | n.d. |
| MS1032LO19-SG1 | M103240H795 | M103202L1045 | 2.73E−10 | 4.58E−08 | 168 |
| MS1032LO21-SG1 | M103245H795 | M103202L1045 | 2.57E−10 | 5.23E−08 | 204 |
| MS1032LO23-SG1 | M103245H1233 | M103202L1045 | 2.60E−10 | 1.61E−08 | 62 |
| MS1032LO24-SG1 | M103205H795 | M103202L1060 | 1.64E−10 | 1.52E−09 | 9 |
| MS1032LO25-SG1 | M103240H1246 | M103202L1045 | 2.76E−10 | 2.55E−08 | 92 |

| | Cyno latent myostatin | | | Mouse latent myostatin | | |
|---|---|---|---|---|---|---|
| | | | ratio of | | | ratio of |
| | KD pH | KD pH | KD at pH | KD pH | KD pH | KD at pH |
| Ab name | 7.4 (M) | 5.8 (M) | 5.8/pH 7.4 | 7.4 (M) | 5.8 (M) | 5.8/pH 7.4 |
| MS1032LO06-5G1 | 3.43E−10 | 2.59E−08 | 76 | 2.99E−10 | 2.26E−08 | 76 |
| MS1032LO07-SG1 | 3.39E−10 | 3.47E−08 | 102 | 3.19E−10 | 3.08E−08 | 97 |
| MS1032LO10-SG1 | 4.19E−10 | 1.61E−08 | 38 | 3.14E−10 | 1.09E−08 | 35 |
| MS1032LO11-SG1 | 5.02E−10 | 4.35E−08 | 87 | 3.62E−10 | 2.92E−08 | 81 |
| MS1032LO12-SG1 | 4.92E−10 | 3.58E−08 | 73 | 4.13E−10 | 2.48E−08 | 60 |
| MS1032LO18-SG1 | 3.54E−10 | 8.09E−08 | 229 | 2.72E−10 | n.d. | n.d |
| MS1032LO19-SG1 | 3.26E−10 | 3.56E−08 | 109 | 2.71E−10 | 2.87E−08 | 106 |
| MS1032LO21-SG1 | 3.09E−10 | 3.10E−08 | 100 | 2.61E−10 | 2.94E−08 | 113 |
| MS1032LO23-SG1 | 2.99E−10 | 7.71E−09 | 26 | 2.66E−10 | 6.40E−09 | 24 |
| MS1032LO24-SG1 | 1.89E−10 | 9.29E−10 | 5 | 1.76E−10 | 1.02E−09 | 6 |
| MS1032LO25-SG1 | 3.40E−10 | 1.41E−08 | 41 | 2.59E−10 | 9.88E−09 | 38 |

n.d.: not determined

Singapore). An anti-latent myostatin antibody (3 mg/ml) was administered at a single dose of 10 ml/kg into the caudal vein. Blood was collected 5 minutes, 7 hours, 1 day, 2 days, 3 days, 7 days, 14 days, 21 days, and 28 days after administration. The collected blood was centrifuged immediately at 14,000 rpm in 4° C. for 10 minutes to separate the plasma. The separated plasma was stored at or below −80° C. until measurement. The anti-latent myostatin antibodies tested were MS1032LO00-SG1, MS1032LO01-SG1, MS1032LO06-SG1, MS1032LO11-SG1, MS1032LO18-SG1, MS1032LO19-SG1, MS1032LO21-SG1 and MS1032LO25-SG1.

[0624] The accumulation of endogenous myostatin was assessed in vivo upon administration of anti-latent myostatin antibody in C.B-17 SCID mice (In Vivos, Singapore). An anti-latent myostatin antibody (3 mg/ml) was administered at a single dose of 10 ml/kg into the caudal vein. Blood was collected 5 minutes, 7 hours, 1 day, 2 days, 3 days, 7 days, 14 days, 21 days, and 28 days after administration. The collected blood was centrifuged immediately at 14,000 rpm in 4° C. for 10 minutes to separate the plasma. The separated plasma was stored at or below −80° C. until measurement. The anti-latent myostatin antibodies tested were MS1032LO00-SG1, MS1032LO01-SG1, MS1032LO06-SG1, MS1032LO11-SG1, MS1032LO18-SG1, MS1032LO9-SG1, MS1032LO21-SG1 and MS1032LO25-SG1.

### Measurement of Total Myostatin Concentration in Plasma by Electrochemiluminescence (ECL)

[0625] The concentration of total myostatin in mouse plasma was measured by ECL. Anti-mature myostatin-immobilized plates were prepared by dispensing biotinylated anti-mature myostatin antibody RK35 (as described in WO 2009/058346) onto a MULTI-ARRAY 96-well streptavidin plate (Meso Scale Discovery) and incubated in blocking buffer for 2 hours at room temperature. Mature myostatin calibration curve samples and mouse plasma samples diluted 40-fold or more were prepared. The samples were mixed in an acidic solution (0.2 M Glycine-HCl, pH2.5) to dissociate mature myostatin from its binding protein (such as propeptide). Subsequently, the samples were added onto an anti-mature myostatin-immobilized plate, and allowed to bind for 1 hour at room temperature before washing. Next, SULFO TAG labelled anti-mature myostatin antibody RK22 (as described in WO 2009/058346) was added and the plate was incubated for 1 hour at room temperature before washing. Read Buffer T (×4) (Meso Scale Discovery) was immediately added to the plate and signal was detected by SECTOR Imager 2400 (Meso Scale Discovery). The mature myostatin concentration was calculated based on the response of the calibration curve using the analytical software SOFTmax PRO (Molecular Devices). The time course of total myostatin concentration in plasma after intravenous administration of anti-latent myostatin antibody measured by this method is shown in FIG. 18.

Effect of pH-Dependent Myostatin Binding on Myostatin Accumulation in Mice In Vivo Study

[0626] The effect of pH-dependency on myostatin accumulation in mice was compared using non pH-dependent anti-latent myostatin antibody (MS1032LO00-SG1) and different pH-dependent anti-latent myostatin antibodies (MS1032LO01-SG1, MS1032LO06-SG1, MS1032LO11-SG1, MS1032LO18-SG1, MS1032LO19-SG1, MS1032LO21-SG1 and MS1032LO25-SG1). Introduction of pH-dependency significantly accelerates myostatin clearance from SCID mouse plasma. As shown in FIG. 18, pH-dependent anti-latent myostatin antibodies (MS1032LO01-SG1, MS1032LO06-SG1, MS1032LO11-SG1, MS1032LO18-SG1, MS1032LO19-SG1, MS1032LO21-SG1 and MS1032LO25-SG1) could reduce myostatin accumulation compared to non pH-dependent anti-latent myostatin antibody (MS1032LO00-SG1) at day 28.

### Example 24

### Comparison of Plasma Total Myostatin Concentration Between Non-pH Dependent Anti-Latent Myostatin Antibody and Anti-Latent Myostatin Antibodies with Both pH- and Fc Engineering in Cynomologous Monkey

### In Vivo Test Using Cynomolgus Monkey

[0627] The accumulation of endogenous myostatin was assessed in vivo upon administration of anti-latent myostatin antibody in 2-4 year old Macaca fascicularis (cynomolgus monkey) from Cambodia (Shin Nippon Biomedical Laboratories Ltd., Japan). An anti-latent myostatin antibody was administered at a dose level of 30 mg/kg into the cephalic vein of the forearm using a disposable syringe, extension tube, indwelling needle, and infusion pump. The dosing speed was 30 minutes per body. Blood was collected before the start of dosing and either 5 minutes, 7 hours and 1, 2, 3, 7, 14, 21, 28, 35, 42, 49 and 56 days after the end of dosing, or 5 minutes and 2, 4, and 7 hours and 1, 2, 3, 7, 14, 21, 28, 35, 42, 49 and 56 days after the end of dosing. Blood was drawn from the femoral vein with a syringe containing heparin sodium. The blood was immediately cooled on ice, and plasma was obtained by centrifugation at 4° C., 1700×g for 10 minutes. The plasma samples were stored in a deep freezer (acceptable range: −70° C. or below) until measurement. The anti-latent myostatin antibodies used were MS1032LO00-SG1, MS1032LO06-SG1012, MS1032LO06-SG1016, MS1032LO06-SG1029, MS1032LO06-SG1031, MS1032LO06-SG1033, and MS1032LO06-SG1034 (herein, SG1012, SG1016, SG1029, SG1031, SG1033, and SG1034 are the heavy chain constant regions constructed based on SG1 as described below).

[0628] A dose level of 2 mg/kg was administered into the cephalic vein of the forearm or saphenous vein using a disposable syringe, and indwelling needle for the anti-latent myostatin antibodies MS1032LO19-SG1079, MS1032LO19-SG1071, MS1032LO19-SG1080, MS1032LO19-SG1074, MS1032LO19-SG1081, and MS1032LO19-SG1077 (herein, SG1079, SG1071, SG1080, SG1074, SG1081, and SG1077 are the heavy chain constant regions constructed based on SG1 as described below). Blood was collected before the start of dosing and 5 minutes and 2, 4, and 7 hours and 1, 2, 3, 7, 14 days after the end of dosing. The blood was processed as described above. Plasma samples were stored in a deep freezer (acceptable range: −70° C. or below) until measurement.

### Measurement of Total Myostatin Concentration in Plasma by Electrochemiluminescence (ECL)

[0629] The concentration of total myostatin in monkey plasma was measured by ECL as described in Example 23. The time course of plasma total myostatin concentration after intravenous administration of anti-latent myostatin antibody as measured by this method is shown in FIG. 19.

### Measurement of ADA in Monkey Plasma Using Electrochemiluminescence (ECL)

[0630] Biotinylated drug was coated onto a MULTI-ARRAY 96-well streptavidin plate (Meso Scale Discovery) and incubated in low cross buffer (Candor) for 2 hours at room temperature. Monkey plasma samples were diluted 20 fold in low cross buffer before addition to the plate. Samples were incubated overnight at 4° C. On the next day, the plate was washed thrice with wash buffer before addition of SULFO TAG labelled anti monkey IgG secondary antibody (Thermo Fisher Scientific). After incubating for an hour at room temperature, the plate was washed three times with wash buffer. Read Buffer T (×4) (Meso Scale Discovery) was immediately added to the plate and signal was detected using a SECTOR Imager 2400 (Meso Scale Discovery).

Effect of pH-Dependent and Fc Engineering on Myostatin Accumulation in Monkey In Vivo

[0631] In cynomolgus monkey, the administration of a non pH-dependent anti-latent myostatin antibody (MS1032LO00-SG1) resulted in an at least 60 fold increase in myostatin concentration from baseline at day 28. At day 28, the administration of pH-dependent anti-latent myostatin antibodies MS1032LO06-SG1012 and MS1032LO06-SG1033 resulted in an 3 fold and 8 fold increase in myostatin concentration from baseline, respectively. The strong sweeping of myostatin was mainly contributed by the increase in affinity to cynomolgus monkey FcγRIIb. At day 28, pH-dependent anti-latent myostatin antibodies MS1032LO06-SG1029, MS1032LO06-SG1031 and MS1032LO06-SG1034 could sweep myostatin to below baseline. The reasons for strong myostatin sweeping of MS1032LO06-SG1029, MS1032LO06-SG1031 and MS1032LO06-SG1034 are an increase in non-specific uptake in the cell due to increase in positive charge cluster of the antibody and/or an increase in FcγR-mediated cellular uptake due to enhanced binding to FcγR.

[0632] The administration of the pH-dependent anti-latent myostatin antibodies, MS1032LO19-SG1079, MS1032LO19-SG1071, MS1032LO19-SG1080, MS1032LO19-SG1074, MS1032LO19-SG1081 and MS1032LO19-SG1077, reduced myostatin concentration to below the detection limit (<0.25 ng/mL) from day 1 in cynomolgus monkey. On day 14, the concentration of myostatin increased above the detectable limit for MS1032LO19-SG1079 and MS1032LO19-SG1071 while the concentration of myostatin remained below the detectable limit for MS1032LO19-SG1080, MS1032LO19-SG1074, MS1032LO19-SG1081 and MS1032LO19-SG1077. The weaker suppression of myostatin concentration levels by the MS1032LO19-SG1079 and MS1032LO19-SG1071 antibodies could be due to the differences in pI mutations that are contained in these antibodies.

[0633] The data suggests that strong sweeping of myostatin from the plasma was achieved by mutations in the anti-myostatin antibodies that increase binding to FcγRIIb or that increase the positive charge of the antibody and increase binding to FcγRIIb. It is expected that strong sweeping of myostatin could be achieved in human by combining mutations that increase positive charge of the antibody and increase binding to FcγR.

### Example 25

### In Vivo Efficacy of Further Optimized Variants in Mouse

[0634] As described in Example 8, the in vivo efficacy was evaluated in Scid mouse using MS1032LO06-SG1, MS1032LO11-SG1, MS1032LO18-SG1, MS1032LO19-SG1, and MS1032LO25-SG1. Three independent studies were conducted and MS1032LO01 was used as the control.

[0635] The results of these experiments are shown in FIGS. 20A-20I. All antibodies (MS1032LO06-SG1, MS1032LO11-SG1, MS1032LO18-SG1, MS1032LO19-SG1, and MS1032LO25-SG1) showed a dose-dependent increase in lean body mass (LBM) as well as appendicular grip strength. The antibodies also showed a decrease in the body fat mass dose-dependently.

### Example 26

### Epitope Mapping of Anti-Latent Myostatin Antibodies

[0636] Additional anti-human latent myostatin antibodies were generated for mapping of their corresponding binding epitopes. Two NZW rabbits were immunized and harvested as described in Example 2. 1760 antibody producing B-cell lines identified were further screened for their ability to block BMP1 mediated activation of human latent myostatin. Briefly, B-cell supernatant containing secreted antibodies were incubated with human latent myostatin in the presence of recombinant human BMP1 (R&D Systems) at 37° C. overnight. 50 μL of the reaction mix were then transferred to Meso Scale Discovery MULTI-ARRAY 96-well plate coated with anti-mature myostain antibody RK35 (as described in WO 2009/058346). After 1 hour incubation at room temperature with shaking, the plates were incubated with biotinylated anti-mature myostatin antibody RK22 (as described in WO 2009/058346) followed by SULFO-tagged streptavidin. Read Buffer T (×4) (Meso Scale Discovery) was then added to the plate and ECL signal was detected by SECTOR Imager 2400 (Meso Scale Discovery). 94 lines showing different levels of neutralizing activities were selected for downstream analysis (MST1495-MST1588). The variable regions of these selected lines were cloned as described in Example 2, except an expression vector with the heavy chain constant region F1332m sequence (SEQ ID NO: 193) was used.

[0637] The inhibitory activity on human latent myostatin activation was further evaluated for a panel of 7 anti-latent myostatin antibodies (MST1032, MST1504, MST11538, MST1551, MST1558, MST1572, and MST1573; the sequence identifiers for amino acid sequences of these antibodies are shown in Table 13). As shown in FIG. 21, all of the antibodies were able to inhibit the BMP1 mediated activation of human latent myostatin in a dose-dependent manner.

TABLE 13
Amino acid sequences of anti-latent myostatin antibodies

| | SEQ ID NO: | | | | | | | |
|---|---|---|---|---|---|---|---|---|
| Antibody | VH | VL | HVR-H1 | HVR-H2 | HVR-H3 | HVR-L1 | HVR-L2 | HVR-L3 |
| MST1032 | 12 | 14 | 55 | 58 | 61 | 65 | 70 | 73 |
| MST1504 | 145 | 151 | 157 | 163 | 169 | 175 | 181 | 187 |
| MST1538 | 146 | 152 | 158 | 164 | 170 | 176 | 182 | 188 |
| MST1551 | 147 | 153 | 159 | 165 | 171 | 177 | 183 | 189 |
| MST1558 | 148 | 154 | 160 | 166 | 172 | 178 | 184 | 190 |
| MST1572 | 149 | 155 | 161 | 167 | 173 | 179 | 185 | 191 |
| MST1573 | 150 | 156 | 162 | 168 | 174 | 180 | 186 | 192 |

[0638] 4 antibodies that worked well in Western blotting were selected for epitope mapping. Fragments of the N-terminal propeptide coding region of human latent myostatin were cloned into a pGEX4.1 vector so as to produce GST tagged propeptide fragments of 100 amino acid each, with 80 amino acid overlap (FIG. 22A). Protein expression was induced in transformed BL21 competent cells with Overnight Express Autoinduction System (Merck Millipore) and protein was extracted using the BugBuster protein extraction reagent (Novagen). Expression of the desired protein fragments at about 37 kDa were verified by Western blotting analysis as described in Example 6 (anti-GST antibody (Abcam)) (FIG. 22B). When tested with anti-human latent myostatin antibodies, as shown in FIG. 22C, although all 4 antibodies could inhibit latent myostatin activation, they recognized different epitopes on human latent myostatin. MST1032 antibody could detect the first five fragments, no bands were detected after the removal of amino acid 81-100 (SEQ ID NO:78). Both MST1538 and MST1572 antibodies bind to the first three fragments only, no bands were detected in the absence of amino acid 41-60 of SEQ ID NO:78. Antibody MST1573 only bound strongly to the first two fragments, suggesting that its epitope lies within amino acid 21-40 of SEQ ID NO:78 (FIG. 22D).

### Example 27

### Development of Novel FcγRIIb-Enhanced Fc Variants

[0639] In this example, Fc engineering to enhance myostatin clearance is illustrated.

[0640] It has been demonstrated in WO 2013/125667 that clearance of a soluble antigen can be enhanced by its administration of antigen-binding molecules comprising an Fc domain displaying an increased affinity for FcγRIIb. Furthermore, Fc variants that can show enhanced binding to human FcγRIIb have been illustrated in WO 2012/115241 and WO 2014/030728. It has been also illustrated that these Fc variants can show selectively enhanced binding to human FcγRIIb and decreased binding to other active FcγRs. This selective enhancement of FcγRIIb binding can be favorable not only for clearance of soluble antigen but also for decreasing the risk of undesired effector functions and immune response.

[0641] For development of an antibody drug, the efficacy, pharmacokinetics, and safety are typically evaluated in non-human animals in which the drug is pharmacologically active. If the antibody is only active in humans, the alternative approaches such as the use of a surrogate antibody must be considered (Bussiere et al., Int. J. Tox. 28: 230-253 (2009)). However, it is not easy to predict the effects of the interaction between the Fc region of the antibody and FcγRs in humans using a surrogate antibody because the expression patterns, protein sequences and/or functions of FcγRs in non-human animals are not always the same as in humans. It is therefore preferable that the Fc regions of antibody drugs have cross-reactivity to FcγRs in non-human animals, such as cynomolgous monkey, which have similar FcγR expression patterns and functions to FcγRs in humans, so that the results obtained in the non-human animals can be extrapolated to humans.

[0642] Therefore Fc variants that display cross-reactivity to human and cynoFcγRs were developed in this study.

### Affinity Measurement of an Existing FcγRIIb-Enhanced Fc Variant Against Human and Monkey FcγRs

[0643] The heavy chain gene of the human FcγRIIb enhanced variant (herein, “FcγRIIb enhanced” means “with enhanced FcγRIIb-binding activity”) disclosed in WO 2012/115241 was generated by substituting Pro at position 238 in EU numbering with Asp in the heavy chain of MS1032LO06-SG1 which is named M103205H795-SG1 (VH, SEQ ID NO: 86; CH, SEQ ID NO: 9). The resultant heavy chain is referred to as M103205H795-MY009 (VH, SEQ ID NO: 86; CH, SEQ ID NO: 252). As the antibody light chain, M103202L889-SK1 (VL, SEQ ID NO: 96; CL, SEQ ID NO: 10) was used. The recombinant antibody was expressed according to the method shown in Example 34.

[0644] The extracellular domains of FcγRs were prepared in the following manner. The synthesis of the genes for the extracellular domain of human FcγRs were carried out in methods known to those skilled in the art based on the information registered in the NCBI. Specifically, FcγRIIa was based on the sequence of NCBI accession #NM_001136219.1, FcγRIIb was on NM_004001.3, FcγRIIIa was on NM_001127593.1, respectively. Allotypes of FcγRIIa and FcγRIIIa were prepared according to the reports about polymorphism for FcγRIIa (J. Exp. Med. 172:19-25 (1990)) and for FcγRIIIa (J. Clin. Invest. 100(5): 1059-1070 (1997)), respectively. The synthesis of the gene for the extracellular domain of cynomolgus monkey FcγRs were constructed by cloning cDNA of each FcγRs from cynomolgus monkeys using the methods known to those skilled in the art. The amino acid sequences of the constructed extracellular domains of FcγRs were shown in the sequence list: (SEQ ID NO 210 for human FcγRIIaR, SEQ ID NO 211 for human FcγRIIaH, SEQ ID NO 214 for human FcγRIIb, SEQ ID NO 217 for human FcγRIIIaF, SEQ ID NO 218 for human FcγRIIIaV, SEQ ID NO 220 for cyno FcγRIIa1, SEQ ID NO 221 for cyno FcγRIIa2, SEQ ID NO 222 for cyno FcγRIIa3, SEQ ID NO 223 for cyno FcγRIIb, SEQ ID NO 224 for cyno FcγRIIIaS). Then His-tag was added to their C-terminus and the obtained each gene was inserted into expression vector designed for mammalian cell expression. The expression vector was introduced into the human embryonic kidney cell-derived FreeStyle293 cells (Invitrogen) to express the target protein. After culturing, the resulting culture supernatant was filtered and purified by the following four steps in principle. The cation exchange chromatography using SP Sepharose FF was performed as the first step, an affinity chromatography against the His-tag (HisTrap HP) as the second step, a gel filtration column chromatography (Superdex200) as the third step, and sterile filtration as the fourth step. The absorbance at 280 nm of the purified proteins were measured using a spectrophotometer and the concentration of the purified protein was determined using an extinction coefficient calculated by the method of PACE (Protein Science 4:2411-2423 (1995)).

[0645] The kinetic analysis of interactions between these antibodies and FcγR was carried out using BIACORE® T200 or BIACORE® 4000 (GE Healthcare). HBS-EP+(GE Healthcare) was used as the running buffer, and the measurement temperature was set to 25° C. A chip produced by immobilizing Protein A, Protein A/G or mouse anti-human IgG kappa light chain (BD Biosciences) onto a Series S Sensor Chip CM4 or CM5 (GE Healthcare) by the amine-coupling method was used. An antibody of interest was captured onto this chip to interact with each FcγR that had been diluted with the running buffer, and binding to the antibody was measured. After the measurement, the antibody captured on the chip was washed off by allowing reaction with 10 mM glycine-HCl, pH1.5 and 25 mM NaOH so that the chip was regenerated and used repeatedly. The sensorgrams obtained as measurement results were analyzed by the 1:1 Langmuir binding model using the BIACORE® Evaluation Software to calculate the binding rate constant ka (L/molls) and dissociation rate constant kd (l/s), and the dissociation constant KD (mol/L) was calculated from these values. Since the binding of MS1032LO06-MY009 to human FcγRIIaH, human FcγRIIIaV, and cynoFcγRIIIaS was weak, kinetic parameters such as KD could not be calculated from the above-mentioned analytical method. Regarding such interactions, KD values were calculated using the following 1:1 binding model described in BIACORE® T100 Software Handbook BR1006-48 Edition AE.

[0646] The behavior of interacting molecules according to the 1:1 binding model on BIACORE® can be described by Equation 1: Req=C·R max/(KD+C)+RI, wherein, Req is a plot of steady-state binding levels to analyte concentration, C is concentration, RI is bulk refractive index contribution in the sample, and Rmax is analyte binding capacity of the surface. When this equation is rearranged, KD can be expressed as Equation 2: KD=C·Rmax/(Req−RI)−C. KD can be calculated by substituting the values of Rmax, RI, and C into Equation 1 or Equation 2. From the current measurement conditions, RI=0, C=2 μmol/L can be used. Furthermore, the Rmax value obtained when globally fitting the sensorgram obtained as a result of analyzing the interaction of each FcγR with IgG1 using the 1:1 Langmuir binding model was divided by the amount of SG1 captured, this was multiplied by the amount of MY009 captured, and the resulting value was used as Rmax. This calculation is based on the hypothesis that the limit quantity of each FcγR that can be bound by SG1 remains unchanged for all variants produced by introducing mutations into SG1, and the Rmax at the time of measurement is proportional to the amount of antibody bound on the chip at the time of measurement. Req was defined as the amount of binding of each FcγR to each variant on the sensor chip observed at the time of measurement.

[0647] Table 14 shows the result of kinetic analysis of SG1 and MY009 against human and cynoFcγRs. The KD values in cells filled in gray were calculated using [Equation 2]since their affinity was too weak to be correctly determined by kinetic analysis. Values of KD fold were calculated by dividing the KD value of SG1 by the KD value of the variant for each FcγR.

[0648] As shown in Table 14, human FcγRIIb-enhanced variant MY009 does not show enhanced binding to cynoFcγRIIb but shows enhanced binding to human FcγRIIb. Its affinity to cynoFcγRIIb was rather decreased by 0.4-fold compared to SG1, indicating that human FcγRIIb-enhanced variant MY009 does not have cross-reactivity to cynoFcγRs.

Development of Novel Fc Variant that Shows Enhanced Binding to Both Human and cynoFcγRIIb
Ideally, novel Fc variant should have enhanced binding to both human and cynoFcγRIIb selectively and a decreased binding to other active FcγRs. However, because the putative Fc binding residues in cynoFcγRIIb are completely the same as either allotype of cynoFcγRIIa (FIG. 23), it is theoretically impossible to achieve selective enhancement of cynoFcγRIIb binding over cynoFcγRIIa. Therefore a novel Fc variant should have selectively enhanced binding to human FcγRIIb, cynoFcγRIIb and cynoFcγRIIa.

TABLE 14
Cross reactivity of a human FcγRIIb-enhanced variant to cynoFcγRs

| Heavy | Sub- | KD (M) for cynoFcgRs | | | | | KD (M) for humanFcgRs | | | |
|---|---|---|---|---|---|---|---|---|---|---|
| chain name | stitution | FcgRIIa2 | FcgRIIa2 | FcgRIIa3 | FcgRIIb | FcgRIIIaS | FcgRIIaH | FcgRIIaR | FcgRIIb | FcgRIIIaV |
| M103205H795- | — | 4.2E−06 | 5.2E−05 | 1.5E−05 | 1.7E−06 | 4.2E−07 | 9.3E−07 | 1.4E−05 | 4.7E−06 | 1.2E−06 |
| SG1 | | | | | | | | | | |
| M103205H795- | P230D | 2.5E−05 | 2.0E−06 | 3.1E−05 | 4.3E−06 | 1.0E−04 | 3.5E−06 | 2.0E−06 | 1.4E−06 | 5.5E−04 |
| MY013 | | | | | | | | | | |

| Heavy | KD fold for cynoFcgRs (SG1 = 1) | | | | | KD fold for humanFcgRs (SG1 = 1) | | | |
|---|---|---|---|---|---|---|---|---|---|
| chain name | FcgRIIa1 | FcgRIIa2 | FcgRIIa3 | FcgRIIb | FcgRIIIaS | FcgRIIaH | FcgRIIaR | FcgRIIb | FcgRIIIaV |
| M103205H795- | 1.0 | 1.0 | 1.0 | 1.0 | 1.000 | 1.00 | 1.0 | 1.0 | 1.000 |
| SG1 | | | | | | | | | |
| M103205H795- | 0.2 | 0.2 | 0.5 | 0.4 | 0.004 | 0.01 | 0.1 | 3.3 | 0.002 |
| MY013 | | | | | | | | | |

[0649] In order to obtain a novel Fc variant that shows selectively enhanced binding to both human and cyno FcγRIIb, the results of comprehensive mutagenesis study performed in WO 2012/115241 were used. In the comprehensive mutagenesis study, comprehensive mutations were introduced into all the positions in FcγR binding regions in IgG1 antibodies and binding to each FcγR was analyzed comprehensively as shown in the following procedures.

[0650] The variable region of a glypican 3 antibody comprising the CDR of GpH7 which is an anti-glypican 3 antibody with improved plasma kinetics disclosed in WO 2009/041062 was used as the antibody heavy chain variable region (GpH7: SEQ ID NO: 225). Similarly, for the antibody light chain, GpL16-k0 (SEQ ID NO: 226) of the glypican 3 antibody with improved plasma kinetics disclosed in WO 2009/041062 was used. Furthermore, B3 (SEQ ID NO: 228) in which a K439E mutation has been introduced into G Id (SEQ ID NO: 227) produced by removing the C terminal Gly and Lys of IgG1 was used as the antibody H chain constant region. This heavy chain, which has been made by fusing GpH7 and B3, is referred to as GpH7-B3 (VH, SEQ ID NO: 225; CH, SEQ ID NO: 228).

[0651] With respect to GpH7-B3, the amino acid residues that are considered to be involved in FcγR binding and the surrounding amino acid residues (positions 234 to 239, 265 to 271, 295, 296, 298, 300, and 324 to 337, according to EU numbering) were substituted, respectively, with 18 amino acid residues excluding the original amino acid residue and Cys. These Fc variants are referred to as B3 variants. B3 variants were expressed and the binding of protein-A purified antibodies to each FcγR (FcγRIIa type H, FcγRIIa type R, FcγRIIb, and FcγRIIIaF) was comprehensively evaluated as follows. Analysis of interaction between each altered antibody and the Fcγ receptor prepared as mentioned above was carried out using BIACORE® T100 (GE Healthcare), BIACORE® T200 (GE Healthcare), BIACORE® A100, or BIACORE® 4000. HBS-EP+(GE Healthcare) was used as the running buffer, and the measurement temperature was set to 25° C. Chips produced by immobilizing Protein A (Thermo Scientific), Protein A/G (Thermo Scientific), or Protein L (ACTIGEN or BioVision) by the amine coupling method to a Series S sensor Chip CM5 or CM4 (GE Healthcare) were used. After capturing of antibodies of interest onto these sensor chips, an Fcγ receptor diluted with the running buffer was allowed to interact, the amount bound to an antibody was measured. However, since the amount of Fey receptor bound depends on the amount of the captured antibodies, the amount of Fey receptor bound was divided by the amount of each antibody captured to obtain corrected values, and these values were compared. Furthermore, antibodies captured onto the chips were washed by 10 mM glycine-HCl, pH1.5, and the chips were regenerated and used repeatedly. The value of the amount of FcγR binding of each B3 variant was divided by the value of the amount of FcγR binding of the parental B3 antibody (an antibody having the sequence of a naturally-occurring human IgG1 at positions 234 to 239, 265 to 271, 295, 296, 298, 300, and 324 to 337, according to EU numbering). The value obtained by multiplying this value by 100 was used as an indicator of the relative FcγR-binding activity of each variant.

[0652] Table 15 shows the binding profile of promising substitutions selected based on the following criteria (more than 40% to human FcγRIIb, lower than 100% to human FcγRIIaR and FcγRIIaH, less than 10% to human FcγRIIIaF, compared to those of parental B3 antibody).

TABLE 15
Binding profile of selected substitutions against human FcγRs

Binding to human FcgRs (parent B3 = 100)

| Mutation | FcgRIIaH | FcgRIIaR | FcgRIIb | FcgRIIIaV |
|---|---|---|---|---|
| G236N | 54 | 81 | 75 | 8 |
| G237Y | 77 | 4 | 85 | 0 |
| G237D | 74 | 0 | 95 | 0 |
| P238E | 21 | 2 | 97 | 1 |
| P238Y | 93 | 9 | 114 | 3 |
| P238M | 86 | 9 | 97 | 2 |
| P238Q | 19 | 4 | 43 | −1 |
| S239P | 49 | 4 | 61 | −1 |
| V266F | 91 | 8 | 88 | 2 |
| S267H | 27 | 3 | 42 | 1 |
| S267L | 63 | 3 | 112 | 2 |
| N325L | 93 | 13 | 116 | 0 |
| N325E | 49 | 13 | 40 | 4 |
| N325I | 76 | 8 | 97 | 1 |
| N325F | 65 | 6 | 72 | −1 |
| A327I | 37 | 12 | 46 | 8 |

[0653] In the next step, cross-reactivity of these substitutions to cynoFcγRs was evaluated. These 16 mutations were introduced into M103205H795-SG1. The variants were expressed using M103202L889-SK as light chain and their affinity to cynoFcγRIIa1, IIa2, IIa3, IIb, IIIaS were analyzed.

[0654] Table 16 shows the binding profile of these 16 variants to cynoFcγRs. The value of the amount of FcγR binding was obtained by dividing the amount of FcγR bound by the amount of each antibody captured. This value was further normalized using the value for SG1 as 100.

TABLE 16
Binding profile of selected substitutions to cynoFcγRs

| | | Binding to cynoFcgRs (SG1 = 100) | | | | |
|---|---|---|---|---|---|---|
| CH Name | Substitution | FcgRIIa1 | FcgRIIa2 | FcgRIIa3 | FcgRIIb | FcgRIIIaS |
| SG1 | | 100 | 100 | 100 | 100 | 100 |
| MY001 | G236N | 83 | 86 | 62 | 85 | 15 |
| SG165 | G237Y | 18 | 17 | 30 | 30 | 7 |
| SG166 | G237D | 10 | 10 | 17 | 8 | 5 |
| SG167 | P238Y | 18 | 14 | 38 | 22 | 14 |
| SG168 | P238E | 21 | 16 | 30 | 28 | 13 |
| SG169 | P238M | 17 | 16 | 32 | 22 | 22 |
| SG170 | P238Q | 16 | 15 | 21 | 18 | 12 |
| SG171 | S239P | 17 | 20 | 18 | 20 | 8 |
| SG172 | V266F | 14 | 17 | 27 | 16 | 31 |
| SG173 | S267L | 13 | 14 | 21 | 12 | 24 |
| SG174 | S267H | 13 | 16 | 20 | 11 | 15 |
| SG175 | N325F | 13 | 13 | 17 | 14 | 8 |
| SG176 | N325I | 14 | 15 | 19 | 16 | 20 |
| SG177 | N325L | 15 | 15 | 25 | 18 | 21 |
| SG178 | N325E | 22 | 21 | 29 | 26 | 36 |
| SG179 | A327I | 19 | 17 | 28 | 19 | 48 |

[0655] Among selected 16 Fc variants, only MY001 maintained binding to cynoFcγRIIb by 85% compared to SG1. Additionally MY001 showed reduced binding to cynoFcγRIIIaS and its binding to cynoFcγRIIa1, IIa2, and IIa3 is maintained. As a result, G236N mutation is the unique substitution which shows similar binding profile to both human and cynoFcγRs.

[0656] Although 0236N substitution shows cross-reactivity to both human and cyno FcγRs, its affinity to FcγRIIb is lower than SG1 (75% for human FcγRIIb and 85% for cynoFcγRIIb, respectively). In order to increase its affinity to FcγRIIb, additional substitutions were evaluated. Specifically, substitutions that showed increased binding to human FcγRIIb, reduced binding to human FcγRIIIa and increased selectivity to human FcγRIIb over human FcγRIIa were selected based on the result of comprehensive mutagenesis study (Table 17),

TABLE 17
Binding profile of additionally selected
substitutions to human FcγRs

Binding to human FcgRs (parent B3 = 100)

| Mutation | FcgRIIaH | FcgRIIaR | FcgRIIb | FcgRIIIaV |
|---|---|---|---|---|
| L234W | 64 | 63 | 90 | 36 |
| L234Y | 38 | 50 | 55 | 63 |
| L235W | 136 | 128 | 130 | 40 |
| G236D | 109 | 91 | 212 | 25 |
| G236A | 165 | 168 | 94 | 65 |
| G236E | 142 | 131 | 117 | 33 |
| G236S | 147 | 161 | 87 | 33 |
| S239N | 99 | 80 | 124 | 111 |
| S239I | 82 | 75 | 108 | 47 |
| S239V | 79 | 71 | 107 | 48 |
| S267A | 176 | 125 | 283 | 145 |
| H268D | 173 | 142 | 307 | 220 |
| H268E | 169 | 132 | 283 | 205 |
| P271G | 152 | 130 | 252 | 93 |
| P271D | 94 | 55 | 110 | 85 |
| P271E | 90 | 51 | 105 | 87 |
| Q295L | 128 | 148 | 156 | 135 |
| S298L | 99 | 71 | 114 | 51 |
| K326T | 138 | 127 | 195 | 164 |
| A327N | 95 | 48 | 123 | 32 |
| L328T | 156 | 135 | 179 | 53 |
| A330R | 116 | 123 | 92 | 73 |
| A330K | 121 | 127 | 96 | 86 |
| P331E | 96 | 67 | 100 | 46 |
| I332D | 129 | 139 | 198 | 235 |
| K334I | 169 | 137 | 174 | 187 |
| K334V | 172 | 132 | 184 | 176 |
| K334Y | 157 | 131 | 160 | 188 |
| K334M | 151 | 127 | 148 | 183 |
| K334D | 97 | 72 | 108 | 155 |

[0657] Among these substitutions, L234W and L234Y were selected for increasing selectivity to human FcγRIIb over human FcγRIIa. And G236A, G236S, A330R, A330K and P331E were selected for decreasing binding to human FcγRIIIa. All other substitutions were selected for increasing binding to human FcγRIIb. The cross-reactivity of the selected substitutions to cynoFcγRs were evaluated. In addition, three substitutions, P396M, V2641, and E233D were also evaluated. The substitutions were introduced into M103205H795-SG1 and the variants were expressed using M103202L889-SK1 as light chain.

[0658] Table 18 shows kinetic analysis of selected substitutions including G236N against both human and cynoFcγRs. Specifically, substitutions were introduced into M103205H795-SG1. The variants were expressed using M103202L889-SK1 as light chain and their affinity to cynoFcγRIIa1, IIa2, IIa3, IIb, IIIaS were analyzed. The KD values in cells filled in gray were calculated using [Equation 2] since their affinity was too weak to be correctly determined by kinetic analysis. Values of KD fold were calculated by dividing the KD value of SG1 by the KD value of the variant for each FcγR.

[0659] G236N showed comparable binding affinity to cynoFcγRIIa1, cynoFcγRIIa2, cynoFcγRIIa3, and cynoFcγRIIb to SG1. Although the affinity to human FcγRIIb is reduced to 0.6-fold, affinities to human FcγRIIaH and human FcγRIIaR are reduced to 0.2-fold and 0.1-fold, respectively, indicating that this substitution has high selectivity to human FcγRIIb over human FcγRIIa. Furthermore, its affinities to cynoFcγRIIIaS and human FcγRIIIaV are 0.03-fold and 0.04-fold, respectively, which is favorable for eliminating ADCC activity. Based on this result, G236N showed almost ideal cross-reactivity to human and cynoFcγRs although its affinity to both human and cynoFcγRIIb should be enhanced.

[0660] Among additional substitutions evaluated, S298L, G236A, P331E, E233D, K334Y, K334M, L235W, S239V, K3341, L234W, K328T, Q295L, K334V, K326T, P396M, 1332D, H268E, P271G, S267A and H268D showed increased binding to both human and cynoFcγRIIb. Specifically, H268D showed the largest effect (7-fold for human FcγRIIb and 5.3-fold for cynoFcγRIIb). With respect to the effect of reduction in FcγRIIIa binding, G236S, A330K, and G236D showed less than 0.5-fold affinity compared to SG1.

[0661] In order to enhance the affinity to both human and cynoFcγRIIb of MY001, combinations of substitutions listed in Table 18 were evaluated. Specifically, substitutions were introduced into M103205H795-SG1. The variants were expressed using M103202L889-SK1 as the light chain and their affinity was analyzed. Table 19 shows the result of kinetic analysis against human and cynoFcγRs. The KD values in cells filled in gray were calculated using [Equation 2] since their affinity was too weak to be correctly

TABLE 18
Kinetic analysis of variants against human and cynoFcγRs

| Heavy | Sub- | KD (M) for cynoFcgRs | | | | | KD (M) for humanFcgRs | | | |
|---|---|---|---|---|---|---|---|---|---|---|
| chain name | stitution | FcgRIIa2 | FcgRIIa2 | FcgRIIa3 | FcgRIIb | FcgRIIIaS | FcgRIIaH | FcgRIIaR | FcgRIIb | FcgRIIIaV |
| M103205H795- | [symbol] | 3.2E−06 | 5.1E−06 | 1.7E−05 | 1.8E−06 | 3.6E−07 | 6.9E−07 | 1.1E−06 | 4.6E−06 | 8.1E−07 |
| SG1 | | | | | | | | | | |
| M103205H795- | [symbol] 233D | 2.9E−06 | 3.4E−06 | 3.2E−06 | 1.7E−06 | 2.3E−07 | 8.5E−07 | 9.4E−07 | 2.9E−06 | 3.7E−07 |
| MY016 | | | | | | | | | | |
| M103205H795- | [symbol] 234W | 2.0E−06 | 1.9E−06 | 3.6E−06 | 9.2E−07 | 3.2E−07 | 1.3E−06 | 1.8E−06 | 2.3E−06 | 7.3E−07 |
| MY006 | | | | | | | | | | |
| M103205H795- | [symbol] 234Y | 4.5E−06 | 4.7E−06 | 5.2E−05 | 2.0E−06 | 3.3E−07 | 2.6E−06 | 5.1E−06 | 3.7E−06 | 4.1E−07 |
| MY013 | | | | | | | | | | |
| M103205H795- | [symbol] 235W | 2.3E−06 | 2.8E−06 | 4.7E−06 | 1.2E−06 | 4.9E−07 | 5.0E−07 | 7.4E−07 | 2.6E−06 | 7.0E−07 |
| MY070 | | | | | | | | | | |
| M103205H795- | [symbol] 236N | 2.9E−06 | 3.6E−06 | 1.5E−05 | 1.8E−06 | 1.2E−05 | 3.2E−06 | 8.2E−06 | 7.7E−06 | 1.8E−05 |
| MY001 | | | | | | | | | | |
| M103205H795- | [symbol] 236D | 6.5E−06 | 6.8E−06 | 1.8E−05 | 4.2E−06 | 3.4E−06 | 1.4E−06 | 1.3E−06 | 2.5E−06 | 3.0E−06 |
| MY061 | | | | | | | | | | |
| M103205H795- | [symbol] 236E | 5.0E−06 | 3.7E−06 | 9.2E−06 | 2.5E−06 | 2.8E−07 | 4.0E−07 | 4.5E−07 | 3.1E−06 | 5.1E−07 |
| MY071 | | | | | | | | | | |
| M103205H795- | [symbol] 236A | 2.0E−06 | 2.3E−06 | 6.2E−06 | 1.1E−06 | 2.7E−07 | 9.2E−08 | 2.1E−07 | 3.6E−06 | 5.6E−07 |
| MY074 | | | | | | | | | | |
| M103205H795- | [symbol] 236S | 2.6E−06 | 3.1E−06 | 1.2E−05 | 2.2E−06 | 1.3E−06 | 1.4E−07 | 5.2E−07 | 9.2E−06 | 5.2E−06 |
| MY124 | | | | | | | | | | |
| M103205H795- | [symbol] 239V | 4.2E−06 | 3.7E−06 | 2.4E−05 | 1.7E−06 | 3.7E−07 | 1.6E−06 | 1.8E−06 | 2.6E−06 | 6.3E−07 |
| MY008 | | | | | | | | | | |
| M103205H795- | [symbol] 239N | 3.8E−06 | 4.5E−06 | 9.6E−06 | 2.4E−06 | 2.0E−07 | 1.1E−06 | 9.1E−07 | 2.6E−06 | 3.7E−07 |
| MY037 | | | | | | | | | | |
| M103205H795- | [symbol] 239I | 3.9E−06 | 4.5E−06 | 1.1E−05 | 1.9E−06 | 3.1E−07 | 1.2E−06 | 1.5E−06 | 2.6E−06 | 5.5E−07 |
| MY038 | | | | | | | | | | |
| M103205H795- | [symbol] 264I | 3.5E−06 | 5.0E−06 | 1.6E−05 | 2.0E−06 | 2.2E−07 | 1.2E−06 | 1.8E−06 | 5.1E−06 | 2.2E−07 |
| MY010 | | | | | | | | | | |
| M103205H795- | [symbol] 267A | 2.3E−06 | 2.8E−06 | 9.9E−06 | 1.0E−06 | 1.5E−07 | 4.9E−07 | 1.7E−07 | 6.6E−07 | 3.4E−07 |
| MY011 | | | | | | | | | | |
| M103205H795- | [symbol] 268E | 2.7E−06 | 2.9E−06 | 5.5E−06 | 6.8E−07 | 9.8E−08 | 4.5E−07 | 2.8E−07 | 9.4E−07 | 1.4E−07 |
| MY017 | | | | | | | | | | |
| M103205H795- | [symbol] 268D | 1.4E−06 | 1.5E−06 | 2.0E−06 | 3.4E−07 | 6.7E−08 | 2.7E−07 | 2.1E−07 | 6.6E−07 | 1.6E−07 |
| MY063 | | | | | | | | | | |
| M103205H795- | [symbol] 271G | 2.1E−06 | 2.3E−06 | 7.9E−06 | 1.1E−06 | 2.0E−07 | 4.4E−07 | 2.3E−07 | 9.0E−07 | 4.8E−07 |
| MY012 | | | | | | | | | | |
| M103205H795- | [symbol] 271D | 5.5E−06 | 1.1E−05 | 4.4E−06 | 3.5E−06 | 3.7E−07 | 1.8E−06 | 1.2E−06 | 3.0E−06 | 6.1E−07 |
| MY040 | | | | | | | | | | |
| M103205H795- | [symbol] 271E | 4.0E−06 | 4.1E−06 | 7.4E−06 | 3.5E−06 | 2.6E−07 | 1.8E−06 | 1.2E−06 | 3.1E−06 | 4.8E−07 |
| MY041 | | | | | | | | | | |
| M103205H795- | [symbol] 295L | 1.2E−06 | 1.3E−06 | 5.1E−06 | 6.7E−07 | 1.7E−07 | 2.4E−07 | 5.0E−07 | 2.0E−06 | 3.4E−07 |
| MY073 | | | | | | | | | | |
| M103205H795- | [symbol] 298L | 5.1E−07 | 3.1E−06 | 8.0E−06 | 1.6E−06 | 4.4E−07 | 1.0E−06 | 9.8E−07 | 4.0E−06 | 5.3E−07 |
| MY042 | | | | | | | | | | |
| M103205H795- | [symbol] 326T | 1.6E−06 | 1.6E−06 | 6.5E−06 | 7.3E−07 | 8.6E−08 | 4.4E−07 | 3.9E−07 | 1.6E−06 | 2.4E−07 |
| MY069 | | | | | | | | | | |
| M103205H795- | [symbol] 327N | 5.8E−06 | 6.1E−06 | 1.8E−05 | 4.4E−06 | 8.4E−07 | 2.9E−06 | 1.5E−06 | 3.0E−06 | 1.2E−06 |
| MY043 | | | | | | | | | | |
| M103205H795- | [symbol] 328T | 2.1E−06 | 2.7E−06 | 5.7E−06 | 1.0E−06 | 5.8E−07 | 3.7E−07 | 5.2E−07 | 2.1E−06 | 1.4E−06 |
| MY068 | | | | | | | | | | |
| M103205H795- | [symbol] 330R | 2.5E−06 | 2.5E−06 | 1.2E−05 | 1.5E−06 | 4.0E−07 | 5.2E−07 | 9.6E−07 | 4.8E−06 | 6.9E−07 |
| MY014 | | | | | | | | | | |
| M103205H795- | [symbol] 330K | 2.5E−06 | 3.0E−06 | 2.3E−05 | 2.4E−06 | 6.0E−07 | 4.8E−07 | 1.3E−06 | 3.2E−06 | 2.2E−06 |
| MY196 | | | | | | | | | | |
| M103205H795- | [symbol] 331E | 3.2E−06 | 3.5E−06 | 5.2E−05 | 1.6E−06 | 4.7E−07 | 1.2E−06 | 9.2E−07 | 3.3E−06 | 9.0E−07 |
| MY044 | | | | | | | | | | |
| M103205H795- | [symbol] 332D | 1.0E−06 | 1.2E−06 | 2.6E−06 | 4.8E−07 | 5.3E−08 | 2.5E−07 | 4.8E−07 | 1.5E−06 | 1.2E−07 |
| MY072 | | | | | | | | | | |
| M103205H795- | [symbol] 334D | 5.7E−06 | 4.0E−06 | 6.8E−06 | 2.2E−06 | 1.4E−07 | 1.6E−06 | 1.6E−06 | 2.9E−06 | 2.4E−07 |
| MY045 | | | | | | | | | | |
| M103205H795- | [symbol] 334I | 2.4E−06 | 2.6E−06 | 6.9E−06 | 1.1E−06 | 1.2E−07 | 5.0E−07 | 6.8E−07 | 2.4E−06 | 2.2E−07 |
| MY064 | | | | | | | | | | |
| M103205H795- | [symbol] 334V | 2.3E−06 | 2.8E−06 | 4.2E−06 | 1.3E−06 | 1.1E−07 | 5.2E−07 | 5.1E−07 | 1.9E−06 | 2.3E−07 |
| MY065 | | | | | | | | | | |
| M103205H795- | [symbol] 334Y | 2.1E−06 | 2.6E−06 | 6.7E−06 | 1.4E−06 | 1.6E−07 | 6.4E−07 | 9.7E−07 | 2.8E−06 | 2.9E−07 |
| MY066 | | | | | | | | | | |
| M103205H795- | [symbol] 334M | 2.1E−06 | 2.3E−06 | 6.7E−06 | 1.1E−06 | 1.0E−07 | 5.3E−07 | 7.6E−07 | 2.8E−06 | 2.0E−07 |
| MY067 | | | | | | | | | | |
| M103205H795- | [symbol] 396M | 1.3E−06 | 1.5E−06 | 4.7E−06 | 6.0E−07 | 1.0E−07 | 3.3E−07 | 3.2E−07 | 1.6E−06 | 2.4E−07 |
| MY015 | | | | | | | | | | |

| Heavy | KD fold for cynoFcgRs (SG1 = 1) | | | | | KD fold for humanFcgRs (SG1 = 1) | | | |
|---|---|---|---|---|---|---|---|---|---|
| chain name | FcgRIIa1 | FcgRIIa2 | FcgRIIa3 | FcgRIIb | FcgRIIIaS | FcgRIIaH | FcgRIIaR | FcgRIIb | FcgRIIIaV |
| M103205H795- | 1.0 | 1.0 | 1.0 | 1.0 | 1.00 | 1.0 | 1.0 | 1.0 | 1.00 |
| SG1 | | | | | | | | | |
| M103205H795- | 1.1 | 1.5 | 5.3 | 1.1 | 1.57 | 0.8 | 1.2 | 1.6 | 2.19 |
| MY016 | | | | | | | | | |
| M103205H795- | 1.6 | 2.7 | 4.7 | 2.0 | 1.13 | 0.5 | 0.6 | 2.0 | 1.11 |
| MY006 | | | | | | | | | |
| M103205H795- | 0.7 | 1.1 | 0.3 | 0.5 | 1.09 | 0.3 | 0.2 | 1.2 | 1.98 |
| MY013 | | | | | | | | | |
| M103205H795- | 1.0 | 1.8 | 3.6 | 1.5 | 0.73 | 1.4 | 1.5 | 1.8 | 1.16 |
| MY070 | | | | | | | | | |
| M103205H795- | 1.1 | 1.4 | 1.1 | 1.0 | 0.03 | 0.2 | 0.1 | 6.6 | 0.04 |
| MY001 | | | | | | | | | |
| M103205H795- | 0.5 | 0.8 | 0.5 | 0.4 | 0.11 | 0.5 | 0.8 | 1.8 | 0.27 |
| MY061 | | | | | | | | | |
| M103205H795- | 0.6 | 1.4 | 1.8 | 0.7 | 1.29 | 1.7 | 2.4 | 1.5 | 1.59 |
| MY071 | | | | | | | | | |
| M103205H795- | 1.6 | 2.2 | 2.7 | 1.6 | 1.33 | 7.5 | 5.2 | 1.3 | 1.45 |
| MY074 | | | | | | | | | |
| M103205H795- | 1.2 | 1.6 | 1.4 | 0.8 | 0.28 | 4.5 | 2.1 | 0.5 | 0.16 |
| MY124 | | | | | | | | | |
| M103205H795- | 0.8 | 1.4 | 0.7 | 1.1 | 0.97 | 0.4 | 0.6 | 1.8 | 1.29 |
| MY008 | | | | | | | | | |
| M103205H795- | 0.8 | 1.1 | 1.6 | 0.8 | 1.80 | 0.6 | 1.2 | 1.8 | 2.19 |
| MY037 | | | | | | | | | |
| M103205H795- | 0.8 | 1.1 | 1.5 | 0.9 | 1.16 | 0.6 | 0.7 | 1.8 | 1.47 |
| MY038 | | | | | | | | | |
| M103205H795- | 0.9 | 1.0 | 1.1 | 0.9 | 1.64 | 0.6 | 0.6 | 0.9 | 3.68 |
| MY010 | | | | | | | | | |
| M103205H795- | 1.4 | 1.6 | 1.7 | 1.8 | 2.40 | 1.4 | 6.5 | 7.0 | 2.38 |
| MY011 | | | | | | | | | |
| M103205H795- | 1.2 | 1.6 | 3.1 | 2.6 | 3.67 | 1.5 | 3.9 | 4.5 | 5.79 |
| MY017 | | | | | | | | | |
| M103205H795- | 2.3 | 3.4 | 8.5 | 5.3 | 5.37 | 2.6 | 5.2 | 7.0 | 5.06 |
| MY063 | | | | | | | | | |
| M103205H795- | 1.5 | 2.2 | 2.2 | 1.6 | 1.80 | 1.6 | 4.0 | 5.1 | 1.69 |
| MY012 | | | | | | | | | |
| M103205H795- | 0.6 | 0.5 | 3.9 | 0.5 | 0.97 | 0.4 | 0.9 | 1.5 | 1.33 |
| MY040 | | | | | | | | | |
| M103205H795- | 0.8 | 1.2 | 2.3 | 0.5 | 1.38 | 0.4 | 0.9 | 1.5 | 1.69 |
| MY041 | | | | | | | | | |
| M103205H795- | 2.7 | 3.9 | 3.3 | 2.7 | 2.12 | 2.9 | 2.2 | 2.3 | 2.38 |
| MY073 | | | | | | | | | |
| M103205H795- | 6.3 | 1.6 | 2.1 | 1.1 | 0.82 | 0.7 | 1.1 | 1.2 | 1.53 |
| MY042 | | | | | | | | | |
| M103205H795- | 2.0 | 3.2 | 2.6 | 2.5 | 4.19 | 1.6 | 2.8 | 2.9 | 3.38 |
| MY069 | | | | | | | | | |
| M103205H795- | 0.6 | 0.1 | 0.5 | 0.4 | 0.43 | 0.2 | 0.7 | 1.5 | 0.68 |
| MY043 | | | | | | | | | |
| M103205H795- | 1.5 | 1.9 | 3.0 | 1.8 | 0.62 | 1.9 | 2.1 | 2.2 | 0.58 |
| MY068 | | | | | | | | | |
| M103205H795- | 1.3 | 2.0 | 1.4 | 1.2 | 0.90 | 1.3 | 1.1 | 1.0 | 1.17 |
| MY014 | | | | | | | | | |
| M103205H795- | 1.3 | 1.7 | 0.7 | 0.8 | 0.60 | 1.4 | 0.8 | 0.7 | 0.37 |
| MY196 | | | | | | | | | |
| M103205H795- | 1.0 | 1.5 | 0.3 | 1.1 | 0.77 | 0.6 | 1.2 | 1.4 | 0.90 |
| MY044 | | | | | | | | | |
| M103205H795- | 3.2 | 4.3 | 6.5 | 3.8 | 6.79 | 2.8 | 2.3 | 3.1 | 6.79 |
| MY072 | | | | | | | | | |
| M103205H795- | 0.6 | 1.3 | 2.5 | 0.8 | 2.57 | 0.4 | 0.7 | 1.6 | 3.38 |
| MY045 | | | | | | | | | |
| M103205H795- | 1.3 | 2.0 | 2.5 | 1.6 | 3.00 | 1.4 | 1.6 | 1.9 | 3.68 |
| MY064 | | | | | | | | | |
| M103205H795- | 1.4 | 1.8 | 4.0 | 1.4 | 3.27 | 1.3 | 2.2 | 2.4 | 3.52 |
| MY065 | | | | | | | | | |
| M103205H795- | 1.5 | 2.0 | 2.5 | 1.3 | 2.25 | 1.1 | 1.1 | 1.6 | 2.79 |
| MY066 | | | | | | | | | |
| M103205H795- | 1.5 | 2.2 | 2.5 | 1.6 | 3.60 | 1.3 | 1.4 | 1.6 | 4.05 |
| MY067 | | | | | | | | | |
| M103205H795- | 2.5 | 3.4 | 3.6 | 3.0 | 3.60 | 2.1 | 3.4 | 2.9 | 3.38 |
| MY015 | | | | | | | | | |

[symbol]

indicates data missing or illegible when filed

TABLE 19
Kinetic analysis of variants which are composed of G236N and additional substitutions

| Heavy | | KD (M) for cynoFcgRs | | | | | KD (M) for humanFcgRs | | | |
|---|---|---|---|---|---|---|---|---|---|---|
| chain name | Substitution | FcgRIIa1 | FcgRIIa2 | FcgRIIa3 | FcgRIIb | FcgRIIIa5 | FcgRIIaH | FcgRIIaR | FcgRIIb | FcgRIII [symbol] |
| M103205H795- | — | 3.2E−06 | 5.1E−06 | 1.7E−05 | 1.8E−06 | 5.6E−07 | 6.9E−07 | 1.1E−06 | 4.6E−06 | 8.1E−07 |
| SG1 | | | | | | | | | | |
| M103205H795- | G236N | 2.9E−06 | 3.6E−06 | 1.5E−05 | 1.8E−06 | 3.2E−05 | 3.2E−06 | 8.2E−06 | 7.7E−06 | 1.8E−05 |
| MY001 | | | | | | | | | | |
| M103205H795- | G236N/P273G | 4.8E−06 | 3.4E−06 | 2.4E−05 | 2.6E−06 | 7.6E−06 | 2.8E−06 | 3.8E−06 | 8.7E−06 | 7.7E−08 |
| MY047 | | | | | | | | | | |
| M103205H795- | G236N/P396M | 1.4E−06 | 1.7E−06 | 7.0E−06 | 9.1E−07 | 5.4E−06 | 1.1E−06 | 3.1E−06 | 3.3E−06 | 1.2E−05 |
| MY048 | | | | | | | | | | |
| M103205H795- | G236N/H268E | 2.7E−06 | 2.3E−06 | 6.6E−06 | 8.5E−07 | 4.5E−06 | 1.8E−06 | 7.8E−06 | 1.5E−06 | 7.8E−06 |
| MY049 | | | | | | | | | | |
| M103205H795- | G236N/S267A/H268E | 4.3E−06 | 4.2E−06 | 1.9E−05 | 1.4E−06 | 1.7E−06 | 2.1E−06 | 1.5E−06 | 7.5E−07 | 3.3E−06 |
| MY050 | | | | | | | | | | |
| M103205H795- | G236N/H268E/P271G | 4.5E−06 | 4.8E−06 | 1.8E−05 | 1.9E−06 | 2.1E−06 | 2.2E−06 | 2.8E−06 | 2.0E−06 | 7.4E−06 |
| MY051 | | | | | | | | | | |
| M103205H795- | G236N/H268E/P396M | 1.4E−06 | 1.5E−06 | 3.9E−06 | 4.6E−07 | 1.5E−06 | 8.3E−07 | 1.4E−06 | 7.2E−07 | 4.6E−06 |
| MY052 | | | | | | | | | | |
| M103205H795- | G236N/H268E/ | 1.1E−06 | 1.2E−06 | 3.6E−06 | 3.5E−07 | 3.2E−06 | 4.9E−07 | 8.7E−07 | 4.9E−07 | 1.1E−05 |
| MY101 | A330K/P396M | | | | | | | | | |
| M103205H795- | G236N/H268E/ | 1.4E−06 | 1.3E−06 | 3.6E−06 | 3.8E−07 | 2.6E−06 | 4.1E−07 | 1.2E−06 | 7.2E−07 | 4.5E−06 |
| MY103 | A330K/P396M | | | | | | | | | |
| M103205H795- | G236N/S239V/ | 1.2E−06 | 9.0E−07 | 1.5E−06 | 3.9E−07 | 1.3E−06 | 1.5E−06 | 1.4E−06 | 5.7E−07 | 5.9E−06 |
| MY105 | H268E/P396M | | | | | | | | | |
| M103205H795- | G236N/S239V/ | 9.0E−07 | 7.3E−07 | 1.2E−06 | 3.0E−07 | 2.2E−06 | 9.5E−07 | 1.4E−06 | 5.0E−07 | 5.5E−06 |
| MY107 | H268E/A330K/P396M | | | | | | | | | |
| M103205H795- | G236N/S239V/ | 8.7E−07 | 7.1E−07 | 1.2E−06 | 2.8E−07 | 2.0E−06 | 9.4E−07 | 1.5E−06 | 5.5E−07 | 4.2E−06 |
| MY109 | H268E/A330K/P396M | | | | | | | | | |
| M103205H795- | L234W/G236N/ | 1.7E−06 | 1.8E−06 | 4.2E−06 | 5.5E−07 | 2.3E−06 | 4.7E−07 | 2.0E−06 | 1.1E−06 | 4.1E−06 |
| MY111 | H268E/A330K/P396M | | | | | | | | | |
| M103205H795- | L234W/G236N/ | 1.6E−06 | 1.7E−06 | 4.0E−06 | 5.0E−07 | 2.0E−06 | 1.3E−06 | 1.8E−06 | 9.8E−07 | 5.7E−06 |
| MY113 | H268E/A330K/P396M | | | | | | | | | |
| M103205H795- | G236N/S267A/ | 2.3E−06 | 2.7E−06 | 7.6E−06 | 7.8E−07 | 8.5E−07 | 9.6E−07 | 6.4E−07 | 3.2E−07 | 8.6E−06 |
| MY115 | H268E/P396M | | | | | | | | | |
| M103205H795- | L234W/G256N/ | 2.6E−06 | 3.2E−06 | 9.9E−06 | 1.0E−06 | 1.0E−06 | 2.2E−06 | 1.0E−06 | 6.0E−07 | 7.9E−06 |
| MY117 | S267A/H268E/P396M | | | | | | | | | |
| M103205H795- | G236N/S267A/P396M | 2.2E−06 | 2.8E−06 | 2.0E−05 | 1.8E−06 | 4.7E−06 | 1.3E−06 | 1.6E−06 | 1.1E−06 | 1.2E−05 |
| MY141 | | | | | | | | | | |
| M103205H795- | G236N/H268E/P396M | 8.9E−07 | 8.9E−07 | 3.8E−05 | 4.4E−07 | 2.5E−06 | 6.5E−07 | 1.5E−06 | 7.4E−07 | 7.7E−06 |
| MY144 | | | | | | | | | | |
| M103205H795- | G236N/H268E/ | 1.9E−06 | 2.4E−06 | 1.0E−05 | 9.8E−07 | 3.6E−06 | 1.8E−06 | 2.5E−06 | 1.2E−06 | 9.1E−06 |
| MY145 | P331E/P396M | | | | | | | | | |
| M103205H795- | G236N/H268E/ | 1.7E−07 | 1.8E−06 | 4.8E−06 | 8.5E−07 | 3.1E−06 | 2.2E−06 | 2.1E−06 | 8.8E−07 | 8.8E−06 |
| MY146 | S298L/P396M | | | | | | | | | |
| M103205H795- | L235W/G236N/ | 2.2E−06 | 2.2E−06 | 6.6E−06 | 9.6E−07 | 5.5E−06 | 1.2E−06 | 1.1E−06 | 8.3E−07 | 1.1E−05 |
| MY147 | H268E/P396M | | | | | | | | | |
| M103205H795- | G236N/H268D/ | 5.8E−07 | 5.6E−07 | 1.4E−06 | 1.7E−07 | 2.1E−06 | 1.6E−07 | 7.1E−07 | 8.9E−07 | 1.0E−05 |
| MY197 | A330K/P396M | | | | | | | | | |
| M103205H795- | G236N/S239V/ | 4.4E−07 | 3.3E−07 | 1.4E−06 | 2.4E−07 | 2.7E−06 | 5.8E−07 | 8.0E−07 | 4.2E−07 | 6.9E−06 |
| MY198 | H268D/A330K/P396M | | | | | | | | | |
| M103205H795- | G236N/H268E/A330K | 1.9E−06 | 2.0E−06 | 1.2E−05 | 1.1E−06 | 4.1E−08 | 1.1E−06 | 2.8E−06 | 1.9E−06 | 1.3E−05 |
| MY199 | | | | | | | | | | |
| M103205H795- | G236N/S2369V/ | 1.7E−06 | 1.5E−06 | 5.0E−06 | 1.1E−06 | 4.4E−06 | 1.7E−06 | 2.7E−06 | 1.4E−06 | 1.5E−05 |
| MY200 | H268E/A330K | | | | | | | | | |
| M103205H795- | G236N/H268D/A330K | 1.4E−06 | 1.4E−06 | 5.9E−06 | 4.3E−07 | 5.7E−06 | 9.1E−07 | 1.9E−06 | 1.1E−06 | 2.4E−05 |
| MY201 | | | | | | | | | | |
| M103205H795- | G236N/S239V/ | 8.6E−07 | 6.4E−07 | 2.2E−06 | 4.6E−07 | 4.0E−06 | 1.2E−06 | 1.2E−06 | 7.1E−07 | 9.4E−06 |
| MY202 | H268D/A330K | | | | | | | | | |
| M103205H795- | G236N/S239V/ | 1.3E−06 | 1.4E−06 | 5.2E−06 | 8.1E−07 | 3.5E−06 | 1.3E−06 | 2.8E−06 | 1.5E−06 | 1.1E−05 |
| MY204 | H268E/Q295L/A330K | | | | | | | | | |
| M103205H795- | G236N/H268D/ | 9.0E−07 | 1.1E−06 | 3.0E−06 | 2.5E−07 | 6.0E−06 | 4.7E−07 | 1.3E−06 | 5.8E−07 | 1.5E−05 |
| MY205 | Q295L/A330K | | | | | | | | | |
| M103205H795- | G236N/S239V/ | 8.1E−07 | 7.9E−07 | 3.0E−06 | 4.5E−07 | 3.5E−06 | 1.0E−06 | 1.4E−06 | 9.0E−07 | 8.2E−06 |
| MY206 | H268D/Q295L/A330K | | | | | | | | | |
| M103205H795- | G236N/H268D | 1.5E−06 | 1.4E−06 | 6.9E−06 | 8.3E−07 | 4.1E−06 | 1.3E−06 | 2.8E−06 | 1.5E−06 | 8.0E−06 |
| MY207 | | | | | | | | | | |
| M103205H795- | G236N/H268D/Q295L | 1.2E−06 | 1.5E−06 | 6.7E−06 | 6.4E−07 | 2.8E−08 | 8.3E−07 | 2.1E−06 | 1.1E−06 | 1.0E−05 |
| MY208 | | | | | | | | | | |
| M103205H795- | G236N/H268D/ | 6.3E−07 | 6.9E−07 | 1.9E−06 | 1.9E−07 | 2.2E−06 | 5.7E−07 | 8.8E−07 | 5.0E−07 | 1.4E−05 |
| MY209 | Q295L/K326T/A330K | | | | | | | | | |
| M103205H795- | G236N/H268D/ | 9.5E−07 | 8.4E−07 | 2.3E−06 | 2.8E−07 | 2.4E−06 | 8.8E−07 | 1.4E−06 | 9.8E−07 | 3.1E−05 |
| MY210 | K326T/A330K | | | | | | | | | |
| M103205H795- | G236N/S239V/ | 7.5E−07 | 5.8E−07 | 2.7E−06 | 4.7E−07 | 3.0E−06 | 1.1E−06 | 1.3E−06 | 8.2E−07 | 4.8E−05 |
| MY211 | H268D/K326T/A330K | | | | | | | | | |
| M103205H795- | G236N/S239V/ | 5.6E−07 | 5.5E−07 | 2.9E−06 | 5.7E−07 | 2.6E−06 | 8.0E−07 | 1.3E−06 | 6.3E−07 | 6.5E−06 |
| MY212 | H268D/Q295L/ | | | | | | | | | |
| | K326T/A330K | | | | | | | | | |
| M103205H795- | G236N/Q295L | 1.5E−06 | 2.0E−06 | 1.1E−05 | 1.2E−06 | 1.3E−09 | 1.4E−06 | 8.5E−06 | 5.1E−06 | 6.8E−05 |
| MY288 | | | | | | | | | | |
| M103205H795- | G236N/A330K/P396M | 1.5E−06 | 1.5E−06 | 8.6E−06 | 7.4E−07 | 5.2E−06 | 8.3E−07 | 3.5E−06 | 2.9E−06 | 7.7E−06 |
| MY289 | | | | | | | | | | |
| M103205H795- | L235W/G236N/ | 2.1E−06 | 2.2E−06 | 4.7E−06 | 6.1E−07 | 6.6E−06 | 9.6E−07 | 9.0E−07 | 6.7E−07 | 1.2E−05 |
| MY350 | H268E/A330K/P396M | | | | | | | | | |
| M103205H795- | L235W/G236N/ | 2.9E−06 | 2.4E−06 | 6.4E−06 | 7.4E−07 | 1.1E−05 | 1.6E−06 | 1.9E−08 | 1.4E−06 | 1.6E−05 |
| MY434 | H268D/A330K | | | | | | | | | |
| M103205H795- | L235W/G236N/ | 1.6E−06 | 1.8E−06 | 4.8E−06 | 4.6E−07 | 9.3E−06 | 9.1E−07 | 1.1E−06 | 8.0E−07 | 2.7E−05 |
| MY440 | H268D/Q295L/A330K | | | | | | | | | |
| M103205H795- | L235W/G256N/ | 8.9E−07 | 9.0E−07 | 2.4E−06 | 2.6E−07 | 4.2E−06 | 8.5E−07 | 6.7E−07 | 4.8E−07 | 2.3E−05 |
| MY518 | H268D/Q295L/ | | | | | | | | | |
| | K326T/A330K | | | | | | | | | |

| Heavy | KD fold for cynoFcgRs (SG1 = 1) | | | | | KD fold for humanFcgRs (SG1 = 2) | | | |
|---|---|---|---|---|---|---|---|---|---|
| chain name | FcgRIIa1 | FcgRIIa2 | FcgRIIa3 | FcgRII [symbol] | FcgRIIIa5 | FcgRIIa [symbol] | FcgRIIa [symbol] | FcgRIIb | FcgRIIIa [symbol] |
| M103205H795- | 1.0 | 1.0 | 1.0 | 1.0 | 1.00 | 1.0 | 1.0 | 1.0 | 1.00 |
| SG1 | | | | | | | | | |
| M103205H795- | 1.1 | 1.4 | 1.1 | 1.0 | 0.05 | 0.2 | 0.1 | 0.6 | 0.04 |
| MY001 | | | | | | | | | |
| M103205H795- | 0.7 | 1.5 | 0.7 | 0.7 | 0.05 | 0.2 | 0.3 | 1.2 | 0.11 |
| MY047 | | | | | | | | | |
| M103205H795- | 2.5 | 3.0 | 2.4 | 2.0 | 0.07 | 0.6 | 0.4 | 1.4 | 0.07 |
| MY048 | | | | | | | | | |
| M103205H795- | 1.2 | 2.2 | 2.6 | 2.1 | 0.08 | 0.4 | 0.1 | 3.1 | 0.10 |
| MY049 | | | | | | | | | |
| M103205H795- | 0.7 | 1.2 | 0.5 | 1.3 | 0.21 | 0.3 | 0.7 | 6.1 | 0.25 |
| MY050 | | | | | | | | | |
| M103205H795- | 0.7 | 1.1 | 0.9 | 0.9 | 0.17 | 0.3 | 0.4 | 2.3 | 0.11 |
| MY051 | | | | | | | | | |
| M103205H795- | 2.5 | 3.4 | 4.4 | 3.9 | 0.24 | 0.8 | 0.8 | 6.4 | 0.18 |
| MY052 | | | | | | | | | |
| M103205H795- | 2.9 | 4.3 | 4.7 | 5.1 | 0.11 | 1.4 | 1.3 | 9.4 | 0.07 |
| MY101 | | | | | | | | | |
| M103205H795- | 2.3 | 3.9 | 4.7 | 4.7 | 0.14 | 1.7 | 0.9 | 6.4 | 0.18 |
| MY103 | | | | | | | | | |
| M103205H795- | 2.7 | 5.7 | 13.1 | 4.6 | 0.28 | 0.5 | 0.8 | 8.1 | 0.14 |
| MY105 | | | | | | | | | |
| M103205H795- | 3.6 | 7.0 | 14.2 | 6.0 | 0.16 | 0.7 | 0.8 | 9.2 | 0.14 |
| MY107 | | | | | | | | | |
| M103205H795- | 3.7 | 7.2 | 14.2 | 6.4 | 0.18 | 0.7 | 0.8 | 8.4 | 0.19 |
| MY109 | | | | | | | | | |
| M103205H795- | 1.9 | 2.8 | 4.0 | 3.5 | 0.16 | 1.5 | 0.6 | 4.2 | 0.26 |
| MY111 | | | | | | | | | |
| M103205H795- | 2.0 | 3.0 | 4.3 | 3.6 | 0.18 | 0.5 | 0.6 | 4.7 | 0.22 |
| MY113 | | | | | | | | | |
| M103205H795- | 1.4 | 1.9 | 2.2 | 2.3 | 0.42 | 0.7 | 1.7 | 14.4 | 0.22 |
| MY115 | | | | | | | | | |
| M103205H795- | 1.2 | 1.6 | 1.7 | 1.8 | 0.36 | 0.5 | 1.1 | 7.7 | 0.10 |
| MY117 | | | | | | | | | |
| M103205H795- | 1.5 | 1.8 | 0.5 | 1.0 | 0.08 | 0.6 | 0.7 | 4.2 | 0.07 |
| MY141 | | | | | | | | | |
| M103205H795- | 3.6 | 5.7 | 4.5 | 4.1 | 0.16 | 1.1 | 0.8 | 6.2 | 0.11 |
| MY144 | | | | | | | | | |
| M103205H795- | 1.7 | 2.1 | 1.7 | 1.8 | 0.10 | 0.4 | 0.5 | 3.8 | 0.09 |
| MY145 | | | | | | | | | |
| M103205H795- | 18.8 | 2.8 | 3.5 | 2.1 | 0.12 | 0.3 | 0.5 | 5.2 | 0.09 |
| MY146 | | | | | | | | | |
| M103205H795- | 1.5 | 2.3 | 2.6 | 1.9 | 0.07 | 0.6 | 1.0 | 5.5 | 0.07 |
| MY147 | | | | | | | | | |
| M103205H795- | 5.5 | 9.1 | 12.1 | 10.6 | 0.17 | 1.9 | 1.5 | 11.8 | 0.08 |
| MY197 | | | | | | | | | |
| M103205H795- | 7.5 | 15.5 | 12.1 | 7.5 | 0.15 | 1.2 | 1.4 | 11.0 | 0.12 |
| MY198 | | | | | | | | | |
| M103205H795- | 1.7 | 2.6 | 1.4 | 1.6 | 0.09 | 0.6 | 0.4 | 2.4 | 0.06 |
| MY199 | | | | | | | | | |
| M103205H795- | 1.9 | 3.4 | 3.4 | 1.6 | 0.08 | 0.4 | 0.4 | 3.3 | 0.09 |
| MY200 | | | | | | | | | |
| M103205H795- | 2.3 | 3.6 | 4.4 | 4.2 | 0.06 | 0.8 | 0.6 | 4.7 | 0.03 |
| MY201 | | | | | | | | | |
| M103205H795- | 3.7 | 8.0 | 7.7 | 3.9 | 0.09 | 0.6 | 0.9 | 6.5 | 0.09 |
| MY202 | | | | | | | | | |
| M103205H795- | 2.5 | 3.6 | 3.3 | 2.2 | 0.10 | 0.5 | 0.4 | 3.5 | 0.07 |
| MY204 | | | | | | | | | |
| M103205H795- | 3.6 | 4.6 | 5.7 | 7.2 | 0.08 | 1.5 | 0.8 | 8.7 | 0.06 |
| MY205 | | | | | | | | | |
| M103205H795- | 4.0 | 6.5 | 5.7 | 4.0 | 0.11 | 0.7 | 0.8 | 5.1 | 0.10 |
| MY206 | | | | | | | | | |
| M103205H795- | 2.1 | 3.6 | 2.5 | 2.2 | 0.09 | 0.5 | 0.4 | 2.9 | 0.10 |
| MY207 | | | | | | | | | |
| M103205H795- | 2.7 | 3.4 | 2.5 | 2.8 | 0.13 | 0.8 | 0.5 | 4.2 | 0.08 |
| MY208 | | | | | | | | | |
| M103205H795- | 5.1 | 7.4 | 8.9 | 9.5 | 0.16 | 1.2 | 1.3 | 9.2 | 0.09 |
| MY209 | | | | | | | | | |
| M103205H795- | 3.4 | 6.1 | 7.4 | 6.4 | 0.15 | 0.8 | 0.8 | 4.7 | 0.03 |
| MY210 | | | | | | | | | |
| M103205H795- | 4.3 | 8.8 | 6.5 | 3.8 | 0.17 | 0.6 | 0.8 | 5.6 | 0.17 |
| MY211 | | | | | | | | | |
| M103205H795- | 5.7 | 9.6 | 5.9 | 4.9 | 0.14 | 0.9 | 0.8 | 7.5 | 0.17 |
| MY212 | | | | | | | | | |
| M103205H795- | 2.1 | 2.6 | 1.5 | 1.5 | 0.03 | 0.5 | 0.1 | 0.5 | 0.01 |
| MY288 | | | | | | | | | |
| M103205H795- | 2.5 | 3.4 | 1.0 | 2.4 | 0.07 | 0.8 | 0.3 | 1.8 | 0.11 |
| MY289 | | | | | | | | | |
| M103205H795- | 1.5 | 2.3 | 3.6 | 3.2 | 0.05 | 0.7 | 1.2 | 6.9 | 0.07 |
| MY350 | | | | | | | | | |
| M103205H795- | 1.1 | 2.1 | 2.7 | 2.4 | 0.03 | 0.4 | 0.8 | 3.5 | 0.05 |
| MY434 | | | | | | | | | |
| M103205H795- | 2.0 | 2.8 | 3.5 | 3.9 | 0.04 | 0.8 | 1.0 | 5.8 | 0.03 |
| MY440 | | | | | | | | | |
| M103205H795- | 3.6 | 5.7 | 7.1 | 6.9 | 0.09 | 0.8 | 1.6 | 9.6 | 0.04 |
| MY518 | | | | | | | | | |

[symbol]

indicates data missing or illegible when filed

determined by kinetic analysis. Values of KD fold were calculated by dividing the KD value of SG1 by the KD value of the variant for each FcγR.

[0662] All the variants suppressed affinities to human FcγRIIIaV by less than 0.26-fold and to cynoFcγRIIIaS by less than 0.42-fold compared to SG1. Furthermore, all the variants except for MY047, MY051, and MY141 successfully showed enhanced binding to both human and cynoFcγRIIb compared to MY001 and their human FcγRIIa binding were maintained to less than 2-fold compared to SG1. Among them, MY201, MY210, MY206, MY144, MY103, MY212, MY105, MY205, MY109, MY107, MY209, MY101, MY518, MY198 and MY197 showed enhanced binding both to human and cynoFcγRIIb by more than 4-fold compared to SG1. Above all, MY205, MY209, MY198, and MY197 showed enhanced binding to both human and cynoFcγRIIb binding by more than 7-fold.

[0663] It was illustrated in WO2014030728 that substitutions at position 396 in CH3 domain enhanced affinity to human FcγRIIb. Comprehensive mutagenesis was introduced into position 396 of M103205H795-MY052, which contains G236N/H268E/P396M substitutions. The resultant variants were expressed using M103202L889-SK1 as light chain and their affinity to human and cynoFcγRs were evaluated (Table 20). Values of KD fold were calculated by dividing the KD value of SG1 by the KD value of the variant for each FcγR.

[0664] Among substitutions tested, P3961, P396K, and P396L maintained human FcγRIIb binding by more than 5-fold compared to SG1 and only P396L substitution enhanced affinity to human FcγRIIb compared to MY052. With respect to the binding to cynoFcγRIIb, parent MY052 showed the highest affinity which is a 3.9-fold increase from SG1.

[0665] Since G236N showed ideal cross-reactivity to human and cynoFcγRs, other substitutions on position 236 which were not evaluated in the preceding examples were tested. Specifically, Asn in M103205H795-MY201 were substituted with Met, His, Val, Gln, Leu, Thr, and Ile. The resultant variants were expressed using M103202L889-SK1 as light chain and their affinity to human and cynoFcγRs were evaluated (Table 21). The KD values in cells filled in gray were calculated using [Equation 2]since their affinity was too weak to be correctly determined by kinetic analysis. Values of KD fold were calculated by dividing the KD value of SG1 by the KD value of the variant for each FcγR.

TABLE 20
Kinetic analysis of P396 variants derived from MY052

| | | | KD (M) for cynoFcgRs | | | | |
|---|---|---|---|---|---|---|---|
| Heavy chain name | Substitution | | FcgRIIa1 | FcgRIIa2 | FcgRIIa3 | FcgRIIb | FcgRIIIaS |
| M103205H795-SG1 | — | | 3.2E−06 | 5.1E−06 | 1.7E−06 | 1.8E−06 | 3.6E−07 |
| M103205H795-MY052 | G236N/H268E/P396M | | 1.4E−06 | 1.5E−06 | 3.9E−06 | 4.6E−07 | 1.5E−06 |
| M103205H795-MY168 | G236N/H268E/P396A | | 2.2E−06 | 2.5E−06 | 1.0E−06 | 1.2E−08 | 4.5E−06 |
| M103205H795-MY169 | G236N/H268E/P396D | | 2.3E−05 | 2.3E−06 | 9.9E−06 | 1.0E−06 | 3.5E−06 |
| M103205H795-MY170 | G236N/H268E/P396E | | 2.3E−05 | 2.4E−06 | 1.2E−06 | 1.2E−06 | 7.9E−06 |
| M103205H795-MY171 | G236N/H268E/P396F | | 2.3E−06 | 2.3E−06 | 9.2E−06 | 9.8E−06 | 3.3E−06 |
| M103205H795-MY172 | G236N/H268E/P396G | | 2.7E−06 | 2.8E−06 | 1.1E−06 | 1.2E−06 | 3.5E−06 |
| M103205H795-MY173 | G236N/H268E/P396H | | 1.7E−06 | 1.8E−06 | 8.0E−06 | 7.3E−07 | 3.1E−06 |
| M103205H795-MY174 | G236N/H268E/P396I | | 1.5E−06 | 1.6E−06 | 6.4E−06 | 6.5E−07 | 2.5E−06 |
| M103205H795-MY175 | G236N/H268E/P396K | | 1.4E−06 | 1.5E−06 | 7.5E−06 | 7.1E−07 | 2.6E−06 |
| M103205H795-MY176 | G236N/H268E/P396L | | 1.3E−06 | 1.4E−06 | 6.0E−06 | 6.1E−07 | 2.2E−06 |
| M103205H795-MY177 | G236N/H268E/P396N | | 1.9E−06 | 1.8E−06 | 8.1E−06 | 8.3E−07 | 2.9E−06 |
| M103205H795-MY178 | G236N/H268E/P396Q | | 2.0E−06 | 2.1E−06 | 8.7E−06 | 9.5E−07 | 3.0E−06 |
| M103205H795-MY179 | G236N/H268E/P396R | | 1.9E−06 | 2.0E−06 | 7.9E−06 | 9.8E−07 | 2.7E−06 |
| M103205H795-MY180 | G236N/H268E/P396S | | 2.6E−06 | 2.7E−06 | 1.2E−06 | 1.3E−06 | 3.1E−06 |
| M103205H795-MY181 | G236N/H268E/P396T | | 2.3E−06 | 2.3E−06 | 9.2E−06 | 1.0E−06 | 4.1E−06 |
| M103205H795-MY182 | G236N/H268E/P396V | | 2.1E−06 | 2.2E−06 | 7.8E−06 | 9.6E−07 | 3.6E−06 |
| M103205H795-MY183 | G236N/H268E/P396W | | 2.1E−06 | 2.0E−06 | 8.4E−06 | 9.7E−07 | 3.5E−06 |
| M103205H795-MY184 | G236N/H268E/P396Y | | 1.9E−06 | 2.0E−06 | 8.4E−06 | 9.0E−07 | 3.3E−06 |
| | | | | | KD fold for | | |
| | KD (M) for humanFcgRs | | | | cynoFcgRs (SG1 = 1) | | |
| Heavy chain name | FcgRIIaH | FcgRIIaR | FcgRIIb | FcgRIIIaV | FcgRIIa1 | FcgRIIa2 | FcgRIIa3 |
| M103205H795-SG1 | 6.9E−07 | 1.1E−06 | 4.6E−06 | 8.1E−07 | 1.0 | 1.0 | 1.0 |
| M103205H795-MY052 | 8.3E−07 | 1.4E−06 | 7.2E−07 | 1.5E−06 | 2.3 | 3.4 | 4.4 |
| M103205H795-MY168 | 1.6E−06 | 2.8E−06 | 1.7E−06 | 8.1E−06 | 1.5 | 2.0 | 1.7 |
| M103205H795-MY169 | 1.2E−06 | 2.5E−06 | 1.3E−06 | 6.2E−06 | 1.4 | 2.2 | 1.7 |
| M103205H795-MY170 | 1.7E−06 | 2.5E−06 | 1.6E−06 | 6.3E−06 | 1.4 | 2.1 | 1.4 |
| M103205H795-MY171 | 1.2E−06 | 2.3E−06 | 1.2E−06 | 5.9E−06 | 1.4 | 2.2 | 1.5 |
| M103205H795-MY172 | 1.7E−06 | 3.1E−06 | 1.8E−06 | 6.5E−06 | 1.2 | 1.8 | 1.5 |
| M103205H795-MY173 | 1.0E−06 | 1.9E−06 | 1.0E−06 | 7.0E−06 | 1.5 | 2.8 | 2.1 |
| M103205H795-MY174 | 8.1E−07 | 1.4E−06 | 8.5E−07 | 6.8E−06 | 2.1 | 3.2 | 2.7 |
| M103205H795-MY175 | 8.6E−07 | 1.5E−06 | 8.3E−07 | 7.5E−06 | 2.3 | 3.4 | 2.3 |
| M103205H795-MY176 | 7.0E−07 | 1.3E−06 | 7.0E−07 | 6.2E−06 | 2.5 | 3.6 | 2.8 |
| M103205H795-MY177 | 1.0E−06 | 2.0E−06 | 1.1E−06 | 6.2E−06 | 1.7 | 2.8 | 2.1 |
| M103205H795-MY178 | 1.2E−06 | 2.3E−06 | 1.3E−06 | 4.5E−06 | 1.6 | 2.4 | 2.0 |
| M103205H795-MY179 | 1.1E−06 | 2.1E−06 | 1.2E−06 | 5.9E−06 | 1.7 | 2.8 | 2.2 |
| M103205H795-MY180 | 1.7E−06 | 3.0E−06 | 1.9E−06 | 5.9E−06 | 1.7 | 1.9 | 1.4 |
| M103205H795-MY181 | 1.3E−06 | 2.5E−06 | 1.4E−06 | 7.3E−06 | 1.4 | 2.2 | 1.1 |
| M103205H795-MY182 | 1.3E−06 | 2.1E−06 | 1.2E−06 | 7.0E−06 | 1.5 | 2.3 | 2.2 |
| M103205H795-MY183 | 1.2E−06 | 2.1E−06 | 1.1E−06 | 7.7E−06 | 1.5 | 2.6 | 2.0 |
| M103205H795-MY184 | 1.1E−06 | 2.0E−06 | 1.1E−06 | 6.8E−06 | 1.7 | 2.8 | 2.0 |

| | KD fold for | | | | | |
|---|---|---|---|---|---|---|
| | cynoFcgRs | | | | | |
| | (SG1 = 1) | | KD fold for humanFcgRs (SG1 = 1) | | | |
| Heavy chain name | FcgRII [symbol] | FcgRIIIaS | FcgRIIaH | FcgRIIa [symbol] | FcgRIIb | FcgRIIIaV |
| M103205H795-SG1 | 1.0 | 1.00 | 1.0 | 1.0 | 1.0 | 1.00 |
| M103205H795-MY052 | 3.5 | 0.24 | 0.8 | 0.1 | 6.4 | 0.54 |
| M103205H795-MY168 | 1.5 | 0.08 | 0.4 | 0.4 | 2.7 | 0.10 |
| M103205H795-MY169 | 1.8 | 0.10 | 0.6 | 0.4 | 3.5 | 0.13 |
| M103205H795-MY170 | 1.5 | 0.17 | 0.4 | 0.4 | 2.5 | 0.13 |
| M103205H795-MY171 | 1.5 | 0.11 | 0.5 | 0.5 | 3.8 | 0.14 |
| M103205H795-MY172 | 1.5 | 0.17 | 0.4 | 0.4 | 2.6 | 0.12 |
| M103205H795-MY173 | 2.3 | 0.12 | 0.7 | 0.6 | 4.6 | 0.12 |
| M103205H795-MY174 | 2.8 | 0.14 | 0.9 | 0.8 | 5.4 | 0.12 |
| M103205H795-MY175 | 2.5 | 0.14 | 0.8 | 0.7 | 5.5 | 0.11 |
| M103205H795-MY176 | 1.0 | 0.16 | 1.0 | 0.1 | 6.5 | 0.13 |
| M103205H795-MY177 | 2.2 | 0.12 | 0.7 | 0.1 | 4.2 | 0.13 |
| M103205H795-MY178 | 1.9 | 0.17 | 0.6 | 0.5 | 3.5 | 0.15 |
| M103205H795-MY179 | 1.8 | 0.13 | 0.6 | 0.5 | 3.8 | 0.14 |
| M103205H795-MY180 | 1.4 | 0.17 | 0.4 | 0.4 | 2.4 | 0.14 |
| M103205H795-MY181 | 1.8 | 0.09 | 0.5 | 0.4 | 3.3 | 0.11 |
| M103205H795-MY182 | 1.9 | 0.10 | 0.5 | 0.5 | 3.8 | 0.17 |
| M103205H795-MY183 | 1.9 | 0.10 | 0.6 | 0.5 | 4.7 | 0.11 |
| M103205H795-MY184 | 2.0 | 0.11 | 0.6 | 0.6 | 4.7 | 0.12 |

[symbol]

indicates data missing or illegible when filed

TABLE 21
Kinetic analysis of G236 variants derived from MY201

| | | | KD (M) for cynoFcgRs | | | | |
|---|---|---|---|---|---|---|---|
| Heavy chain name | Substitution | | FcgRIIa1 | FcgRIIa2 | FcgRIIa3 | FcgRIIb | FcgRIIIaS |
| M103205H795-SG1 | — | | 3.2E−06 | 5.1E−06 | 1.7E−05 | 1.8E−06 | 3.5E−07 |
| M103205H795-MY201 | G236 [symbol] /H268D/A330K | | 1.4E−06 | 1.4E−06 | 3.9E−05 | 4.3E−07 | 5.7E−06 |
| M103205H795-MY260 | G238M/H268D/A330K | | 4.5E−06 | 3.7E−06 | 1.4E−05 | 1.6E−06 | 8.5E−07 |
| M103205H795-MY261 | G236H/H268D/A330K | | 3.7E−06 | 4.0E−06 | 5.5E−05 | 1.5E−06 | 2.4E−06 |
| M103205H795-MY262 | G236V/H268D/A330K | | 1.5E−06 | 1.7E−06 | 8.0E−05 | 5.8E−07 | 2.8E−06 |
| M103205H795-MY263 | G236Q/H268D/A330K | | 3.2E−06 | 3.0E−06 | 7.3E−05 | 1.0E−06 | 7.8E−07 |
| M103205H795-MY264 | G236L/H268D/A330K | | 5.6E−06 | 5.5E−06 | 1.6E−05 | 2.6E−07 | 3.7E−06 |
| M103205H795-MY265 | G236I/H268D/A330K | | 2.2E−06 | 1.9E−06 | 4.3E−05 | 5.9E−07 | 2.0E−06 |
| M103205H795-MY267 | G236L/H268D/A330K | | 2.4E−06 | 2.0E−06 | 7.3E−05 | 6.4E−07 | 2.7E−06 |
| | KD (M) for humanFcgRs | | | | KD fold for cynoFcgRs (SG1 = 1) | | |
| Heavy chain name | FcgRIIaH | FcgRIIaR | FcgRIIb | FcgRIIIaV | FcgRIIa1 | FcgRIIa2 | FcgRIIa3 |
| M103205H795-SG1 | 6.9E−07 | 1.1E−06 | 4.8E−06 | 8.1E−07 | 1.0 | 1.0 | 1.0 |
| M103205H795-MY201 | 9.1E−07 | 1.9E−06 | 1.1E−06 | 2.4E−05 | 2.3 | 3.8 | 4.0 |
| M103205H795-MY260 | 9.1E−07 | 1.8E−06 | 6.1E−06 | 3.0E−05 | 0.7 | 1.4 | 1.7 |
| M103205H795-MY261 | 2.4E−07 | 1.1E−06 | 5.3E−08 | 1.1E−05 | 0.9 | 1.3 | 3.1 |
| M103205H795-MY262 | 1.4E−07 | 7.3E−07 | 6.0E−06 | 5.0E−06 | 1.7 | 3.0 | 2.1 |
| M103205H795-MY263 | 3.2E−07 | 7.1E−07 | 3.5E−06 | 2.3E−06 | 1.0 | 1.7 | 2.3 |
| M103205H795-MY264 | 1.5E−07 | 2.3E−06 | 2.2E−05 | 6.4E−05 | 0.8 | 0.9 | 2.1 |
| M103205H795-MY265 | 2.1E−07 | 4.4E−07 | 2.7E−06 | 5.4E−05 | 1.5 | 2.7 | 3.5 |
| M103205H795-MY267 | 2.0E−07 | 7.1E−07 | 5.7E−06 | 1.5E−05 | 1.3 | 2.5 | 2.3 |

| | KD fold for | | | | | |
|---|---|---|---|---|---|---|
| | cynoFcgRs | | | | | |
| | (SG1 = 1) | | KD fold for humanFcgRs (SG1 = 1) | | | |
| Heavy chain name | FcgRIIb | FcgRIIIaS | FcgRIIaH | FcgRIIaR | FcgRIIb | FcgRIIIaV |
| M103205H795-SG1 | 1.0 | 1.00 | 1.0 | 1.0 | 1.0 | 1.00 |
| M103205H795-MY201 | 4.2 | 0.05 | 0.8 | 0.5 | 4.2 | 0.03 |
| M103205H795-MY260 | 1.1 | 0.55 | 0.7 | 0.5 | 0.8 | 0.27 |
| M103205H795-MY261 | 1.2 | 0.15 | 2.9 | 1.0 | 0.9 | 0.07 |
| M103205H795-MY262 | 3.2 | 0.35 | 4.9 | 1.5 | 0.3 | 0.16 |
| M103205H795-MY263 | 1.8 | 0.46 | 2.2 | 1.5 | 1.3 | 0.39 |
| M103205H795-MY264 | 0.7 | 0.10 | 0.5 | 0.5 | 0.4 | 0.01 |
| M103205H795-MY265 | 3.1 | 0.18 | 3.3 | 2.5 | 2.1 | 0.15 |
| M103205H795-MY267 | 2.1 | 0.13 | 3.5 | 1.5 | 0.5 | 0.05 |

[symbol]

indicates data missing or illegible when filed

TABLE 22
Kinetic analysis of variants derived from. MY265

| | | KD (M) for cynoFcgRs | | | | |
|---|---|---|---|---|---|---|
| Heavy chain name | Substitutions | FcgRIIa1 | FcgRIIa2 | FcgRIIa3 | FcgRIIb | FcgRIIIaS |
| M103205H795-SG1 | — | 3.2E−06 | 5.1E−06 | 1.7E−05 | 1.8E−06 | 3.6E−07 |
| M103205H795-MY265 | I236T/H268D/A330K | 2.2E−06 | 1.9E−06 | 4.8E−06 | 5.9E−07 | 2.0E−06 |
| M103205H795-MY459 | I231D/G236T/H268D/A330K | 5.0E−06 | 4.7E−06 | 7.5E−06 | 1.1E−06 | 3.2E−06 |
| M103205H795-MY460 | I231E/G236T/H268D/A330K | 3.1E−06 | 3.1E−06 | 5.5E−06 | 7.9E−07 | 2.7E−06 |
| M103205H795-MY461 | I231F/G236T/H268D/A330K | 1.8E−06 | 1.8E−06 | 3.5E−06 | 4.7E−07 | 2.1E−06 |
| M103205H795-MY462 | I231G/G236T/H268D/A330K | 1.9E−06 | 1.8E−06 | 4.2E−06 | 4.7E−07 | 1.8E−06 |
| M103205H795-MY463 | I231H/G236T/H268D/A330K | 2.1E−06 | 1.8E−06 | 4.4E−06 | 5.8E−07 | 1.6E−06 |
| M103205H795-MY464 | I231I/G236T/H268D/A330K | 1.9E−06 | 1.5E−06 | 3.9E−06 | 5.0E−07 | 1.7E−06 |
| M103205H795-MY465 | I231K/G236T/H268D/A330K | 2.0E−06 | 2.8E−06 | 5.2E−06 | 6.3E−07 | 1.9E−06 |
| M103205H795-MY466 | I231L/G236T/H268D/A330K | 1.9E−06 | 1.8E−06 | 4.4E−06 | 5.1E−07 | 1.8E−06 |
| M103205H795-MY467 | A231M/G236T/H268D/A330K | 1.9E−06 | 1.9E−06 | 4.7E−06 | 5.1E−07 | 1.7E−06 |
| M103205H795-MY468 | I231N/G236T/H268D/A330K | 2.8E−06 | 2.5E−06 | 5.2E−06 | 6.5E−07 | 2.3E−06 |
| M103205H795-MY469 | I231P/G236T/H268D/A330K | 2.2E−06 | 2.1E−06 | 4.9E−06 | 6.1E−07 | 2.2E−06 |
| M103205H795-MY470 | I231Q/G236T/H268D/A330K | 2.2E−06 | 1.8E−06 | 4.9E−06 | 5.5E−07 | 1.7E−06 |
| M103205H795-MY471 | I231R/G236T/H268D/A330K | 2.6E−06 | 2.1E−06 | 4.5E−06 | 7.0E−07 | 1.8E−06 |
| M103205H795-MY472 | I231S/G236T/H268D/A330K | 2.4E−06 | 2.1E−06 | 5.1E−06 | 6.6E−07 | 2.3E−06 |
| M103205H795-MY473 | A231T/G236T/H268D/A330K | 1.6E−06 | 2.6E−06 | 5.5E−06 | 5.8E−07 | 1.7E−06 |
| M103205H795-MY474 | I231V/G236T/H268D/A330K | 2.0E−06 | 1.8E−06 | 4.8E−06 | 5.0E−07 | 1.6E−06 |
| M103205H795-MY475 | I231W/G236T/H268D/A330K | 1.0E−06 | 1.0E−06 | 2.5E−06 | 2.7E−07 | 1.7E−06 |
| M103205H795-MY476 | I231Y/G236T/H268D/A330K | 1.4E−06 | 1.3E−06 | 2.6E−06 | 3.9E−07 | 2.0E−06 |
| M103205H795-MY441 | P232A/G236T/H268D/A330K | 3.9E−06 | 3.3E−06 | 8.0E−06 | 8.8E−07 | 2.6E−06 |
| M103205H795-MY442 | P232D/G236T/H268D/A330K | 4.4E−06 | 4.2E−06 | 6.8E−06 | 1.1E−06 | 2.1E−06 |
| M103205H795-MY443 | P232E/G236T/H268D/A330K | 4.8E−06 | 5.0E−06 | 8.8E−06 | 1.2E−06 | 2.6E−06 |
| M103205H795-MY444 | P232F/G236T/H268D/A330K | 1.2E−06 | 1.1E−06 | 1.9E−06 | 3.0E−07 | 1.6E−06 |
| M103205H795-MY445 | P232G/G236T/H268D/A330K | 5.6E−06 | 5.5E−06 | 1.4E−05 | 1.4E−06 | 3.5E−06 |
| M103205H795-MY446 | P232H/G236T/H268D/A330K | 2.5E−06 | 2.2E−06 | 4.7E−06 | 6.3E−07 | 2.9E−06 |
| M103205H795-MY447 | P232I/G236T/H268D/A330K | 9.9E−07 | 8.8E−07 | 1.5E−06 | 2.3E−07 | 1.1E−06 |
| M103205H795-MY448 | P232K/G236T/H268D/A330K | 9.6E−06 | 7.5E−06 | 2.1E−05 | 2.3E−06 | 6.5E−06 |
| M103205H795-MY449 | P232L/G236T/H268D/A330K | 8.7E−07 | 9.4E−07 | 1.5E−06 | 2.3E−07 | 1.0E−06 |
| M103205H795-MY450 | P232M/G236T/H268D/A330K | 1.3E−06 | 1.1E−06 | 2.2E−06 | 2.8E−07 | 1.3E−06 |
| M103205H795-MY451 | P232N/G236T/H268D/A330K | 3.6E−06 | 4.2E−06 | 6.7E−06 | 1.0E−06 | 2.7E−06 |
| M103205H795-MY452 | P232Q/G236T/H268D/A330K | 3.4E−06 | 3.1E−06 | 6.5E−06 | 9.2E−07 | 2.8E−06 |
| M103205H795-MY453 | P232R/G236T/H268D/A330K | 6.2E−06 | 9.9E−06 | 2.1E−05 | 2.1E−06 | 6.5E−06 |
| M103205H795-MY454 | P232S/G236T/H268D/A330K | 3.8E−06 | 3.1E−06 | 7.6E−06 | 1.0E−06 | 2.8E−06 |
| M103205H795-MY455 | P232T/G236T/H268D/A330K | 3.1E−06 | 2.9E−06 | 5.4E−06 | 9.2E−07 | 2.8E−06 |
| M103205H795-MY456 | P232V/G236T/H268D/A330K | 1.9E−06 | 1.7E−06 | 3.4E−06 | 5.2E−07 | 2.0E−06 |
| M103205H795-MY457 | P232W/G236T/H268D/A330K | 8.1E−07 | 8.4E−07 | 1.2E−06 | 2.0E−07 | 1.1E−06 |
| M103205H795-MY458 | P232Y/G236T/H268D/A330K | 1.8E−06 | 1.6E−06 | 3.0E−06 | 4.3E−07 | 1.9E−06 |

| | KD (M) for humanFcgRs | | | | KD fold for cynoFcgRs (SG1 = 1) | | |
|---|---|---|---|---|---|---|---|
| Heavy chain name | FcgRIIaH | FcgRIIaR | FcgRIIb | FcgRIIIaV | FcgRIIa1 | FcgRIIa2 | FcgRIIa3 |
| M103205H795-SG1 | 6.9E−07 | 1.1E−06 | 4.6E−06 | 8.1E−07 | 1.0 | 1.0 | 1.0 |
| M103205H795-MY265 | 2.1E−07 | 4.4E−07 | 2.2E−06 | 5.4E−06 | 1.5 | 2.7 | 3.5 |
| M103205H795-MY459 | 3.9E−07 | 5.6E−07 | 2.5E−06 | 8.7E−06 | 0.6 | 1.1 | 2.3 |
| M103205H795-MY460 | 2.6E−07 | 5.5E−07 | 2.4E−06 | 6.7E−06 | 1.0 | 1.6 | 3.1 |
| M103205H795-MY461 | 1.8E−07 | 3.4E−07 | 1.7E−06 | 5.4E−06 | 1.8 | 2.8 | 4.9 |
| M103205H795-MY462 | 2.4E−07 | 4.9E−07 | 1.9E−06 | 5.4E−06 | 1.7 | 3.2 | 4.0 |
| M103205H795-MY463 | 2.2E−07 | 5.1E−07 | 2.3E−06 | 4.8E−06 | 1.5 | 2.8 | 3.9 |
| M103205H795-MY464 | 1.7E−07 | 2.6E−07 | 1.6E−06 | 4.4E−06 | 1.7 | 3.4 | 4.4 |
| M103205H795-MY465 | 2.5E−07 | 6.0E−07 | 2.8E−06 | 5.5E−06 | 1.6 | 1.8 | 3.5 |
| M103205H795-MY466 | 1.7E−07 | 2.6E−07 | 1.4E−06 | 4.6E−06 | 1.7 | 2.8 | 3.9 |
| M103205H795-MY467 | 1.8E−07 | 3.6E−07 | 2.0E−06 | 4.8E−06 | 1.7 | 2.7 | 3.6 |
| M103205H795-MY468 | 2.8E−07 | 4.7E−07 | 2.6E−06 | 6.8E−06 | 1.1 | 2.0 | 3.5 |
| M103205H795-MY469 | 2.0E−07 | 4.3E−07 | 2.4E−06 | 5.9E−06 | 1.5 | 2.4 | 3.5 |
| M103205H795-MY470 | 2.1E−07 | 4.7E−07 | 2.3E−06 | 5.1E−06 | 1.5 | 2.8 | 3.5 |
| M103205H795-MY471 | 2.3E−07 | 4.7E−07 | 2.8E−06 | 5.3E−06 | 1.2 | 2.4 | 3.5 |
| M103205H795-MY472 | 2.5E−07 | 4.9E−07 | 2.5E−06 | 6.2E−06 | 1.3 | 2.4 | 3.3 |
| M103205H795-MY473 | 2.2E−07 | 4.9E−07 | 2.2E−06 | 5.2E−06 | 2.0 | 2.0 | 3.1 |
| M103205H795-MY474 | 1.3E−07 | 3.4E−07 | 2.0E−06 | 4.6E−06 | 1.6 | 2.8 | 3.5 |
| M103205H795-MY475 | 9.0E−07 | 2.1E−07 | 1.1E−06 | 5.0E−06 | 3.2 | 5.1 | 7.4 |
| M103205H795-MY476 | 1.4E−07 | 2.5E−07 | 1.2E−06 | 5.5E−06 | 2.3 | 3.9 | 6.5 |
| M103205H795-MY441 | 3.6E−07 | 6.0E−07 | 2.8E−06 | 8.1E−06 | 0.8 | 1.5 | 2.1 |
| M103205H795-MY442 | 4.6E−07 | 4.2E−07 | 1.8E−06 | 4.7E−06 | 0.7 | 1.2 | 2.5 |
| M103205H795-MY443 | 5.3E−07 | 6.4E−07 | 2.8E−06 | 5.9E−06 | 0.7 | 1.0 | 1.5 |
| M103205H795-MY444 | 1.1E−07 | 1.4E−07 | 7.4E−07 | 5.2E−06 | 2.7 | 4.6 | 8.9 |
| M103205H795-MY445 | 5.6E−07 | 1.1E−06 | 4.2E−06 | 9.5E−06 | 0.6 | 0.5 | 1.2 |
| M103205H795-MY446 | 2.6E−07 | 4.8E−07 | 2.4E−06 | 7.1E−06 | 1.5 | 2.3 | 3.6 |
| M103205H795-MY447 | 9.7E−08 | 9.8E−08 | 4.4E−07 | 4.0E−06 | 3.2 | 5.6 | 11.3 |
| M103205H795-MY448 | 9.1E−07 | 2.1E−08 | 8.4E−06 | 1.3E−06 | 0.3 | 0.7 | 0.6 |
| M103205H795-MY449 | 9.8E−08 | 7.4E−08 | 2.9E−07 | 3.7E−06 | 3.7 | 5.4 | 11.3 |
| M103205H795-MY450 | 1.3E−07 | 1.2E−07 | 4.7E−07 | 4.0E−06 | 2.5 | 4.6 | 7.7 |
| M103205H795-MY451 | 4.1E−07 | 6.4E−07 | 3.0E−06 | 7.1E−06 | 0.9 | 1.2 | 2.5 |
| M103205H795-MY452 | 3.6E−07 | 6.2E−07 | 2.9E−06 | 6.1E−06 | 0.9 | 1.6 | 2.6 |
| M103205H795-MY453 | 7.3E−07 | 1.6E−08 | 6.5E−06 | 1.4E−06 | 0.5 | 0.5 | 0.8 |
| M103205H795-MY454 | 4.1E−07 | 7.6E−07 | 3.1E−06 | 5.9E−06 | 0.8 | 1.8 | 2.2 |
| M103205H795-MY455 | 3.1E−07 | 4.6E−07 | 2.2E−06 | 6.6E−06 | 1.0 | 1.8 | 3.1 |
| M103205H795-MY456 | 1.7E−07 | 2.9E−07 | 1.1E−06 | 5.3E−06 | 1.7 | 3.0 | 5.0 |
| M103205H795-MY457 | 1.2E−07 | 7.3E−08 | 3.3E−07 | 3.6E−06 | 4.0 | 6.1 | 14.2 |
| M103205H795-MY458 | 1.6E−07 | 1.7E−07 | 9.9E−07 | 5.3E−06 | 1.8 | 3.2 | 5.7 |

| | KD fold for | | | | | |
|---|---|---|---|---|---|---|
| | cynoFcgRs | | | | | |
| | (SG1 = 1) | | KD fold for humanFcgRs (SG1 = 1) | | | |
| Heavy chain name | FcgRIIb | FcgRIIIaS | FcgRIIaH | FcgRIIaR | FcgRIIb | FcgRIIIaV |
| M103205H795-SG1 | 1.0 | 1.0 | 1.0 | 1.0 | 1.0 | 1.0 |
| M103205H795-MY265 | 3.1 | 0.2 | 3.3 | 2.5 | 2.1 | 0.2 |
| M103205H795-MY459 | 1.6 | 0.2 | 1.6 | 2.0 | 1.8 | 0.1 |
| M103205H795-MY460 | 2.3 | 0.2 | 2.7 | 2.0 | 1.9 | 0.1 |
| M103205H795-MY461 | 3.6 | 0.2 | 3.6 | 3.2 | 2.7 | 0.2 |
| M103205H795-MY462 | 3.6 | 0.2 | 2.9 | 2.2 | 2.4 | 0.2 |
| M103205H795-MY463 | 3.1 | 0.2 | 3.1 | 2.2 | 2.0 | 0.2 |
| M103205H795-MY464 | 3.6 | 0.2 | 4.1 | 4.2 | 2.9 | 0.2 |
| M103205H795-MY465 | 2.5 | 0.2 | 2.8 | 1.8 | 1.6 | 0.1 |
| M103205H795-MY466 | 3.5 | 0.2 | 4.1 | 4.2 | 3.3 | 0.2 |
| M103205H795-MY467 | 3.5 | 0.2 | 3.8 | 3.1 | 2.3 | 0.2 |
| M103205H795-MY468 | 2.8 | 0.2 | 2.5 | 2.3 | 1.8 | 0.1 |
| M103205H795-MY469 | 3.0 | 0.2 | 3.5 | 2.6 | 1.9 | 0.1 |
| M103205H795-MY470 | 3.3 | 0.2 | 3.3 | 2.3 | 2.0 | 0.2 |
| M103205H795-MY471 | 2.6 | 0.2 | 3.0 | 2.3 | 1.6 | 0.2 |
| M103205H795-MY472 | 2.7 | 0.2 | 2.8 | 2.2 | 1.8 | 0.1 |
| M103205H795-MY473 | 3.1 | 0.2 | 3.1 | 2.2 | 2.1 | 0.2 |
| M103205H795-MY474 | 3.6 | 0.2 | 4.1 | 3.2 | 2.9 | 0.2 |
| M103205H795-MY475 | 6.7 | 0.2 | 7.7 | 5.2 | 4.2 | 0.2 |
| M103205H795-MY476 | 4.6 | 0.2 | 4.9 | 4.4 | 3.8 | 0.1 |
| M103205H795-MY441 | 2.0 | 0.2 | 1.9 | 1.8 | 1.6 | 0.1 |
| M103205H795-MY442 | 1.0 | 0.2 | 1.5 | 2.6 | 2.6 | 0.2 |
| M103205H795-MY443 | 1.5 | 0.2 | 1.5 | 1.7 | 1.6 | 0.1 |
| M103205H795-MY444 | 6.0 | 0.2 | 6.5 | 7.5 | 6.2 | 0.2 |
| M103205H795-MY445 | 1.3 | 0.2 | 1.2 | 1.0 | 1.1 | 0.1 |
| M103205H795-MY446 | 2.5 | 0.2 | 2.7 | 2.3 | 1.9 | 0.1 |
| M103205H795-MY447 | 7.8 | 0.3 | 7.1 | 11.2 | 10.5 | 0.2 |
| M103205H795-MY448 | 0.8 | 0.2 | 0.7 | 0.5 | 0.5 | 0.1 |
| M103205H795-MY449 | 7.8 | 0.4 | 7.0 | 14.9 | 15.9 | 0.2 |
| M103205H795-MY450 | 6.4 | 0.3 | 5.3 | 9.2 | 9.8 | 0.2 |
| M103205H795-MY451 | 1.8 | 0.2 | 1.7 | 1.7 | 1.5 | 0.1 |
| M103205H795-MY452 | 2.0 | 0.2 | 2.9 | 1.8 | 1.6 | 0.1 |
| M103205H795-MY453 | 0.9 | 0.2 | 0.9 | 0.7 | 0.7 | 0.2 |
| M103205H795-MY454 | 1.8 | 0.2 | 1.7 | 1.4 | 1.5 | 0.2 |
| M103205H795-MY455 | 2.0 | 0.2 | 2.7 | 2.4 | 2.1 | 0.1 |
| M103205H795-MY456 | 3.5 | 0.2 | 4.1 | 3.8 | 4.2 | 0.2 |
| M103205H795-MY457 | 9.0 | 0.3 | 5.6 | 15.1 | 13.9 | 0.2 |
| M103205H795-MY458 | 4.2 | 0.2 | 4.3 | 4.3 | 4.6 | 0.2 |

[0666] Although all the variants showed decreased affinity to both human and cynoFcγRIIb compared to the parent MY201, MY265, which is produced by substituting Asn with Thr at position 236 of MY201, maintained enhanced binding by 2.1-fold for human FcγRIIb and 3.1-fold for cynoFcγRIIb, respectively, compared to SG1. MY265 also maintained reduced binding to both human and cynoFcγRIIIa. Although affinity to human FcγRIIaH and FcγRIIaR was enhanced by more than 2.5-fold compared to SG1, G236T is the second favorable substitution at position 236.

[0667] In order to improve the selectivity and affinity of MY265 to human FcγRIIb, comprehensive mutagenesis study into position 231 and 232 was performed. Specifically position 231 and 232 of M103205H795-MY265 were substituted with 18 amino acid residues excluding the original amino acid and Cys. The resultant variants were expressed using M103202L889-SK1 as light chain and their affinity to human and cynoFcγRs were evaluated (Table 22). Values of KD fold were calculated by dividing the KD value of SG1 by the KD value of the variant for each FcγR.

[0668] With respect to affinity to FcγRIIb, the addition of A231T, A231M, A231V, A231G, A231F, A231I, A231L, A231, A231W, P232V, P232Y, P232F, P232M, P2321, P232W, P232L increased binding to both human and cynoFcγRIIb compared to parent MY265. Above all, addition of A231T and A231G reduced human FcγRIIaR binding compared to MY265.

[0669] The combination of the substitutions which was not evaluated in the preceding examples were evaluated. The substitutions tested and revealed to be promising were introduced into M103205H795-SG1 in combination. The resultant variants were expressed using M103202L889-SK1 as light chain and their affinity to human and cynoFcγRs were evaluated. Tables 23A and 23B show the result and the KD values in cells filled in gray were calculated using [Equation 2]since their affinity was too weak to be correctly determined by kinetic analysis. Values of KD fold were calculated by dividing the KD value of SG1 by the KD value of the variant for each FcγR. The values for MY209 which was selected as a promising variants in Table 19 were shown again for comparison.

[0670] Among the variants tested, only MY213 showed higher binding affinity to both human and cynoFcγRIIb compared to MY209. However, the affinities of MY213 to human FcγRIIaH and human FcγRIIaR are higher than those of MY209.

TABLE 23A
Kinetic analysis of other combinations

| | | KD (M) for cynoFcgRs | | | | |
|---|---|---|---|---|---|---|
| Heavy chain name | Substitutions | FcgRIIa1 | FcgRIIa2 | FcgRIIa3 | FcgRIIb | FcgRIIIa5 |
| M103205H795-SG1 | — | 3.2E+06 | 5.1E+06 | 1.7E+05 | 1.8E+06 | 3.6E+07 |
| M103205H795-MY209 | G236N/H268D/Q295L/K326T/A330K | 6.3E+07 | 6.9E+07 | 1.9E+06 | 1.9E+07 | 2.2E+06 |
| M103205H795-MY142 | G236E/H268E/P396M | 4.1E+06 | 4.9E+06 | 2.5E+05 | 1.8E+06 | 1.4E+07 |
| M103205H795-MY143 | G236S/H268E/P396M | 1.1E+06 | 1.3E+06 | 2.9E+06 | 4.6E+07 | 2.8E+07 |
| M103205H795-MY269 | G236M/H268D/A330K/P396K | 2.3E+06 | 2.6E+06 | 6.4E+06 | 6.5E+07 | 2.2E+07 |
| M103205H795-MY270 | G236H/H268D/A330K/P396K | 1.8E+06 | 2.1E+06 | 2.6E+06 | 5.3E+07 | 1.1E+06 |
| M103205H795-MY271 | G236V/H268D/A330K/P396K | 7.6E+07 | 7.0E+07 | 3.1E+06 | 1.9E+07 | 837E+07 |
| M103205H795-MY272 | G236Q/H268D/A330K/P396K | 1.7E+06 | 1.9E+06 | 6.2E+06 | 4.3E+07 | 2.9E+07 |
| M103205H795-MY273 | G236L/H268D/A330K/P396K | 3.7E+06 | 3.5E+06 | 1.1E+05 | 1.2E+06 | 1.7E+06 |
| M103205H795-MY274 | G236T/H268D/A330K/P396K | 8.8E+07 | 8.0E+07 | 2.0E+06 | 2.3E+07 | 6.2E+07 |
| M103205H795-MY276 | G236I/H268D/A330K/P396K | 1.2E+06 | 1.1E+06 | 4.5E+06 | 3.1E+07 | 1.2E+06 |
| M103205H795-MY278 | G236M/H268D/Q295L/A330K | 3.0E+06 | 3.6E+06 | 1.0E+05 | 1.1E+06 | 7.4E+07 |
| M103205H795-MY279 | G236H/H268D/Q295L/A330K | 2.8E+06 | 3.3E+06 | 4.7E+06 | 9.1E+07 | 2.4E+06 |
| M103205H795-MY280 | G236V/H268D/Q295L/A330K | 1.0E+06 | 1.2E+06 | 4.6E+06 | 3.3E+07 | 1.8E+06 |
| M103205H795-MY281 | G236Q/H268D/Q295L/A330K | 1.9E+06 | 2.5E+06 | 9.1E+06 | 6.2E+07 | 7.4E+07 |
| M103205H795-MY285 | G236I/H268D/Q295L/A330K | 1.6E+06 | 1.7E+06 | 6.8E+06 | 5.8E+07 | 2.9E+06 |
| M103205H795-MY213 | G236N/H268D/A330K/P396K | 5.3E+07 | 5.2E+07 | 1.3E+06 | 1.6E+07 | 1.9E+06 |
| M103205H795-MY242 | G238I/H268D/A330K/P396K | 4.5E+06 | 4.2E+06 | 5.9E+06 | 1.1E+06 | 5.3E+07 |
| M103205H795-MY219 | G237Y/H268D/A330K | 3.5E+06 | 4.0E+06 | 5.5E+06 | 1.3E+06 | 6.2E+06 |
| M103205H795-MY227 | G237Y/H268D/A330K/P396K | 1.9E+06 | 2.5E+06 | 2.5E+06 | 5.1E+07 | 3.9E+06 |
| M103205H795-MY228 | G237Y/H268D/Q295L/A330K | 3.0E+06 | 3.1E+06 | 3.6E+06 | 1.1E+06 | 9.7E+06 |
| M103205H795-MY229 | G237Y/H268D/Q295L/A330K/P396K | 1.6E+06 | 2.2E+06 | 1.9E+06 | 4.7E+07 | 4.2E+06 |
| M103205H795-MY292 | G237Y/H268D/Q295L/A330K/P396M | 1.5E+06 | 2.6E+06 | 2.2E+06 | 4.5E+07 | 4.0E+06 |
| M103205H795-MY293 | G237Y/H268E/Q295L/A330K/P396K | 2.8E+06 | 3.3E+06 | 3.9E+06 | 8.6E+07 | 4.2E+06 |
| M103205H795-MY308 | G236T/H268E/A330K | 3.3E+06 | 4.6E+06 | 1.1E+05 | 1.5E+06 | 2.3E+06 |
| M103205H795-MY309 | G236T/H268E/A330K/P396M | 2.5E+06 | 2.5E+06 | 7.0E+06 | 7.1E+07 | 1.2E+06 |
| M103205H795-MY310 | G236T/H268E/K326T/A330K | 3.0E+06 | 2.9E+06 | 7.2E+06 | 9.5E+07 | 1.8E+06 |
| M103205H795-MY311 | G236T/H268E/Q295L/A330K | 2.3E+06 | 3.4E+06 | 8.6E+06 | 7.8E+07 | 2.4E+06 |
| M103205H795-MY312 | G236T/H268E/K326T/A330K/P396M | 1.4E+06 | 1.5E+06 | 3.7E+06 | 4.0E+07 | 6.5E+07 |
| M103205H795-MY316 | G236L/H268E/Q295L/A330K/P396K | 5.1E+06 | 8.6E+06 | 2.2E+05 | 2.0E+06 | 2.4E+06 |
| M103205H795-MY318 | G236L/H268E/K326T/A330K/P396M | 7.9E+06 | 7.7E+06 | 3.2E+05 | 2.2E+06 | 1.5E+06 |
| M103205H795-MY321 | G236H/H268D/A330K/P396M | 2.3E+06 | 2.2E+06 | 2.9E+06 | 6.4E+07 | 1.1E+06 |
| M103205H795-MY325 | G236O/H268D/A330K | 4.0E+06 | 4.4E+06 | 5.8E+06 | 9.8E+07 | 4.0E+06 |
| M103205H795-MY327 | G236O/H268E/Q295L/A330K | 3.4E+06 | 4.8E+06 | 5.3E+06 | 1.0E+06 | 4.5E+06 |
| M103205H795-MY329 | G236O/H268D/Q295L/A330K | 1.9E+06 | 3.1E+06 | 3.7E+06 | 5.9E+07 | 2.3E+06 |

| | KD (M) for humanFcgRs | | | | KD fold for cynoFcgRs (SG1 = 1) | | |
|---|---|---|---|---|---|---|---|
| Heavy chain name | FcgRIIaH | FcgRIIaR | FcgRIIb | FcgRIIIaV | FcgRIIa1 | FcgRIIa2 | FcgRIIa3 |
| M103205H795-SG1 | 6.9E+07 | 1.1E+06 | 4.6E+06 | 8.1E+07 | 1.0 | 1.0 | 1.0 |
| M103205H795-MY209 | 5.7E+07 | 8.8E+07 | 5.0E+07 | 1.4E+05 | 5.1 | 7.4 | 8.9 |
| M103205H795-MY142 | 1.9E+07 | 1.7E+07 | 9.3E+07 | 5.8E+07 | 0.8 | 1.0 | 0.7 |
| M103205H795-MY143 | 3.7E+08 | 8.3E+08 | 6.8E+07 | 1.6E+06 | 2.9 | 3.9 | 5.9 |
| M103205H795-MY269 | 2.5E+07 | 7.2E+07 | 2.1E+06 | 1.1E+06 | 1.4 | 2.0 | 2.7 |
| M103205H795-MY270 | 7.3E+08 | 3.7E+07 | 2.6E+06 | 3.7E+06 | 1.8 | 2.4 | 6.5 |
| M103205H795-MY271 | 4.4E+08 | 2.3E+07 | 2.1E+06 | 2.3E+06 | 4.2 | 7.3 | 5.5 |
| M103205H795-MY272 | 9.2E+08 | 2.5E+07 | 1.2E+06 | 8.7E+07 | 1.9 | 2.7 | 2.7 |
| M103205H795-MY273 | 5.1E+07 | 1.0E+06 | 5.0E+06 | 9.7E+06 | 0.9 | 1.5 | 1.5 |
| M103205H795-MY274 | 8.1E+06 | 1.7E+07 | 9.5E+07 | 2.5E+06 | 3.6 | 6.4 | 8.5 |
| M103205H795-MY276 | 5.3E+08 | 2.5E+07 | 2.4E+06 | 5.7E+06 | 2.9 | 4.6 | 3.8 |
| M103205H795-MY278 | 5.3E+07 | 1.5E+06 | 4.4E+06 | 3.4E+06 | 1.1 | 1.4 | 1.7 |
| M103205H795-MY279 | 1.4E+07 | 7.2E+07 | 4.6E+06 | 7.0E+06 | 1.1 | 1.5 | 3.6 |
| M103205H795-MY280 | 8.1E+08 | 4.5E+07 | 2.9E+06 | 4.4E+06 | 3.2 | 4.3 | 3.7 |
| M103205H795-MY281 | 1.3E+07 | 3.9E+07 | 1.8E+06 | 2.1E+06 | 1.7 | 2.0 | 1.9 |
| M103205H795-MY285 | 1.1E+07 | 5.6E+07 | 3.9E+06 | 1.6E+05 | 2.0 | 3.0 | 2.5 |
| M103205H795-MY213 | 3.5E+07 | 6.9E+07 | 3.6E+07 | 1.1E+05 | 6.0 | 9.8 | 13.1 |
| M103205H795-MY242 | 8.2E+07 | 6.3E+07 | 1.9E+06 | 3.2E+06 | 0.7 | 1.2 | 2.9 |
| M103205H795-MY219 | 2.8E+06 | 1.6E+07 | 3.4E+07 | 9.1E+05 | 0.9 | 1.3 | 3.1 |
| M103205H795-MY227 | 1.3E+06 | 6.2E+08 | 1.3E+07 | 1.8E+05 | 1.7 | 2.0 | 6.8 |
| M103205H795-MY228 | 2.2E+06 | 1.6E+07 | 3.0E+07 | 1.4E+04 | 1.1 | 1.6 | 4.7 |
| M103205H795-MY229 | 9.8E+07 | 8.1E+08 | 1.5E+07 | 3.7E+05 | 2.0 | 2.3 | 8.9 |
| M103205H795-MY292 | 9.5E+07 | 7.6E+08 | 1.4E+07 | 2.8E+05 | 2.1 | 2.0 | 7.7 |
| M103205H795-MY293 | 1.3E+06 | 7.3E+08 | 1.5E+07 | 3.9E+05 | 1.1 | 1.5 | 4.4 |
| M103205H795-MY308 | 4.5E+07 | 8.6E+07 | 4.1E+06 | 8.8E+06 | 1.0 | 1.1 | 1.5 |
| M103205H795-MY309 | 1.4E+07 | 2.6E+07 | 1.6E+06 | 4.3E+06 | 1.3 | 2.0 | 2.4 |
| M103205H795-MY310 | 4.0E+07 | 5.5E+07 | 2.9E+06 | 6.9E+06 | 1.1 | 1.8 | 2.4 |
| M103205H795-MY311 | 2.0E+07 | 4.5E+07 | 2.1E+06 | 7.1E+06 | 1.4 | 1.5 | 2.0 |
| M103205H795-MY312 | 1.1E+07 | 1.7E+07 | 1.1E+06 | 2.8E+06 | 2.3 | 3.4 | 4.6 |
| M103205H795-MY316 | 4.4E+07 | 1.1E+06 | 4.0E+06 | 1.7E+05 | 0.6 | 0.6 | 0.8 |
| M103205H795-MY318 | 1.1E+06 | 1.3E+06 | 4.8E+06 | 8.7E+06 | 0.4 | 0.7 | 0.5 |
| M103205H795-MY321 | 7.1E+08 | 3.8E+07 | 2.6E+06 | 3.4E+06 | 1.4 | 2.3 | 5.9 |
| M103205H795-MY325 | 5.1E+07 | 3.0E+07 | 2.6E+07 | 8.1E+06 | 0.8 | 1.2 | 2.9 |
| M103205H795-MY327 | 3.5E+07 | 2.0E+07 | 1.7E+07 | 9.9E+06 | 0.9 | 1.1 | 3.2 |
| M103205H795-MY329 | 2.7E+07 | 2.1E+07 | 1.6E+07 | 6.4E+06 | 1.7 | 1.6 | 4.6 |

| | KD fold for | | | | | |
|---|---|---|---|---|---|---|
| | cynoFcgRs | | | | | |
| | (SG1 = 1) | | KD fold for humanFcgRs (SG1 = 1) | | | |
| Heavy chain name | FcgRIIb | FcgRIIIa5 | FcgRIIaH | FcgRIIaR | FcgRIIb | FcgRIIIaV |
| M103205H795-SG1 | 1.0 | 1.00 | 1.0 | 1.0 | 1.0 | 1.00 |
| M103205H795-MY209 | 9.5 | 0.16 | 1.2 | 1.3 | 9.2 | 0.06 |
| M103205H795-MY142 | 1.0 | 2.57 | 3.6 | 6.5 | 4.8 | 1.40 |
| M103205H795-MY143 | 3.9 | 1.29 | 18.6 | 13.1 | 6.8 | 0.51 |
| M103205H795-MY269 | 2.8 | 1.64 | 2.8 | 1.5 | 2.2 | 0.74 |
| M103205H795-MY270 | 3.6 | 0.33 | 9.5 | 3.0 | 1.8 | 0.22 |
| M103205H795-MY271 | 9.5 | 0.41 | 15.7 | 4.0 | 2.2 | 0.35 |
| M103205H795-MY272 | 4.2 | 1.24 | 7.5 | 4.4 | 3.8 | 0.93 |
| M103205H795-MY273 | 1.5 | 0.21 | 1.4 | 1.1 | 0.9 | 0.08 |
| M103205H795-MY274 | 7.8 | 0.58 | 8.5 | 6.5 | 4.8 | 0.32 |
| M103205H795-MY276 | 5.6 | 0.30 | 13.0 | 4.4 | 1.9 | 0.14 |
| M103205H795-MY278 | 1.6 | 0.49 | 1.3 | 0.7 | 1.0 | 0.24 |
| M103205H795-MY279 | 2.0 | 0.15 | 4.9 | 1.5 | 1.0 | 0.12 |
| M103205H795-MY280 | 5.5 | 0.20 | 8.5 | 2.4 | 1.6 | 0.18 |
| M103205H795-MY281 | 2.9 | 0.49 | 5.3 | 2.8 | 2.6 | 0.39 |
| M103205H795-MY285 | 3.1 | 0.12 | 6.3 | 2.0 | 1.2 | 0.05 |
| M103205H795-MY213 | 11.3 | 0.19 | 2.0 | 1.6 | 12.8 | 0.07 |
| M103205H795-MY242 | 1.6 | 0.58 | 0.8 | 1.7 | 2.4 | 0.25 |
| M103205H795-MY219 | 1.4 | 0.06 | 0.2 | 6.9 | 13.5 | 0.01 |
| M103205H795-MY227 | 3.5 | 0.09 | 0.5 | 17.7 | 35.4 | 0.04 |
| M103205H795-MY228 | 1.6 | 0.04 | 0.3 | 6.9 | 15.3 | 0.01 |
| M103205H795-MY229 | 3.8 | 0.09 | 0.7 | 13.6 | 30.7 | 0.02 |
| M103205H795-MY292 | 4.0 | 0.09 | 0.7 | 14.5 | 32.9 | 0.03 |
| M103205H795-MY293 | 2.1 | 0.09 | 0.5 | 15.1 | 30.7 | 0.02 |
| M103205H795-MY308 | 1.2 | 0.16 | 1.5 | 1.3 | 1.1 | 0.09 |
| M103205H795-MY309 | 2.5 | 0.30 | 4.9 | 4.2 | 2.9 | 0.19 |
| M103205H795-MY310 | 1.9 | 0.20 | 1.7 | 2.0 | 1.6 | 0.12 |
| M103205H795-MY311 | 2.3 | 0.15 | 3.5 | 2.4 | 2.2 | 0.11 |
| M103205H795-MY312 | 4.5 | 0.55 | 6.3 | 6.5 | 4.2 | 0.29 |
| M103205H795-MY316 | 0.9 | 0.15 | 1.6 | 1.0 | 1.2 | 0.05 |
| M103205H795-MY318 | 0.8 | 0.24 | 0.6 | 0.8 | 1.0 | 0.09 |
| M103205H795-MY321 | 2.8 | 0.33 | 9.7 | 2.9 | 1.8 | 0.24 |
| M103205H795-MY325 | 1.8 | 0.09 | 1.4 | 3.7 | 17.7 | 0.10 |
| M103205H795-MY327 | 1.8 | 0.08 | 2.0 | 5.5 | 27.1 | 0.08 |
| M103205H795-MY329 | 3.1 | 0.18 | 2.6 | 5.2 | 28.8 | 0.13 |

TABLE 23B
Kinetic analysis of other combinations

| | | KD (M) for cynoFcgRs | | | | |
|---|---|---|---|---|---|---|
| Heavy chain name | Substitution | FcgRIIa1 | FcgRIIa2 | FcgRIIa3 | FcgRIIb | FcgRIIIaS |
| M103205H795-SG1 | — | 3.2E−06 | 5.1E−06 | 1.7E−05 | 1.8E−06 | 3.6E−07 |
| M103205H795-MY209 | [symbol] 236N/H268D/Q295L/K326T/A330K | 6.3E−07 | 6.9E−07 | 1.9E−06 | 1.9E−07 | 2.2E−06 |
| M103205H795-MY340 | [symbol] 236N/H268D/Q295L/A330K/P396K | 4.3E−06 | 4.9E−06 | 2.3E−05 | 1.1E−06 | 2.3E−06 |
| M103205H795-MY341 | [symbol] 236N/H268D/Q295L/K326T/A330K/P396K | 2.6E−06 | 2.9E−06 | 8.8E−06 | 6.0E−07 | 9.4E−07 |
| M103205H795-MY342 | [symbol] 236N/H268D/Q295L/A330K/P396M | 5.1E−06 | 8.5E−06 | 5.1E−05 | 1.3E−06 | 2.6E−06 |
| M103205H795-MY283 | [symbol] 236T/H268D/Q295L/A330K | 1.4E−06 | 1.6E−06 | 4.4E−06 | 4.2E−07 | 2.2E−06 |
| M103205H795-MY339 | [symbol] 236L/H268D/K326T/A330K/P396K | 3.4E−06 | 3.0E−06 | 9.8E−06 | 7.3E−07 | 7.6E−07 |
| M103205H795-MY380 | [symbol] 236N/H268E/A330K/P396K | 9.3E−07 | 1.0E−06 | 3.3E−06 | 2.9E−07 | 2.8E−06 |
| M103205H795-MY388 | [symbol] 236L/H268D/Q295L/K326T/A330K | 5.2E−06 | 5.6E−06 | 1.6E−05 | 1.6E−06 | 2.5E−06 |
| M103205H795-MY388 | [symbol] 236T/S239I/H268D/A330K | 2.2E−06 | 1.7E−06 | 1.3E−06 | 7.6E−07 | 1.6E−06 |
| M103205H795-MY389 | [symbol] 236T/S239L/H268D/A330K | 2.0E−06 | 1.6E−06 | 1.4E−06 | 7.0E−07 | 1.5E−06 |
| M103205H795-MY400 | [symbol] 236T/H268D/A330K/P332E | 1.8E−06 | 2.2E−06 | 3.8E−06 | 6.3E−07 | 2.4E−06 |
| M103205H795-MY392 | [symbol] 236T/H268D/S298L/A330K | 3.0E−07 | 2.3E−06 | 3.9E−06 | 7.0E−07 | 4.0E−06 |
| M103205H795-MY387 | [symbol] 236T/S239V/H268D/A330K | 2.3E−06 | 1.9E−06 | 1.4E−06 | 8.3E−07 | 2.5E−06 |
| M103205H795-MY514 | [symbol] 236T/S239V/H268D/S258L/A330K | 2.6E−07 | 1.6E−06 | 1.5E−06 | 7.6E−07 | 4.4E−06 |
| M103205H795-MY515 | [symbol] 236T/H268D/Q295L/S298L/A330K | 1.4E−07 | 1.6E−06 | 2.9E−06 | 3.9E−07 | 3.8E−06 |
| M103205H795-MY516 | [symbol] 236T/S239V/H268D/Q235L/S298L/A330K | 1.5E−07 | 1.3E−06 | 7.9E−07 | 4.5E−07 | 3.0E−06 |
| M103205H795-MY520 | [symbol] 232D/G236T/S239V/H268D/Q295L/A330K | 2.5E−06 | 2.3E−06 | 2.1E−06 | 9.6E−07 | 2.0E−06 |
| M103205H795-MY521 | [symbol] 232D/G236T/H268D/Q235L/A330K | 2.5E−06 | 3.3E−06 | 4.4E−06 | 8.0E−07 | 2.2E−06 |
| M103205H795-MY522 | [symbol] 231G/G236T/S239V/H268D/A330K | 1.7E−06 | 1.2E−06 | 9.3E−07 | 5.3E−07 | 1.9E−06 |
| M103205H795-MY523 | [symbol] 231G/G236T/S239V/H268D/Q295L/A330K | 1.4E−06 | 1.3E−06 | 1.1E−06 | 4.8E−07 | 2.1E−06 |
| M103205H795-MY524 | [symbol] 231G/G236T/H268D/Q295L/A330K | 1.0E−06 | 1.1E−06 | 2.7E−06 | 3.1E−07 | 2.0E−06 |
| M103205H795-MY525 | [symbol] 231T/G236T/S239V/H268D/A330K | 1.6E−06 | 1.1E−06 | 1.1E−06 | 5.1E−07 | 1.4E−06 |
| M103205H795-MY526 | [symbol] 231T/G236T/S239V/H268D/Q295L/A330K | 1.3E−06 | 1.2E−06 | 1.3E−06 | 4.6E−07 | 1.6E−06 |
| M103205H795-MY527 | [symbol] 231T/G236T/H268D/Q295L/A330K | 1.1E−06 | 1.3E−06 | 3.4E−06 | 3.4E−07 | 1.5E−06 |
| M103205H795-MY528 | L234W/G236T/H268D/A330K | 1.4E−06 | 1.5E−06 | 3.2E−06 | 4.1E−07 | 2.0E−06 |
| M103205H795-MY529 | L234W/G236T/H268D/Q295L/A330K | 1.0E−06 | 1.4E−06 | 3.2E−06 | 3.0E−07 | 2.2E−06 |
| M103205H795-MY530 | [symbol] 236T/H268D/K326T/A330K | 1.3E−06 | 1.1E−06 | 2.5E−06 | 3.2E−07 | 8.6E−07 |
| M103205H795-MY531 | [symbol] 234W/G236T/H268D/K326T/A330K | 1.1E−06 | 9.2E−07 | 2.2E−06 | 2.7E−07 | 1.0E−06 |
| M103205H795-MY532 | [symbol] 234W/G236T/S239V/H268D/A330K | 7.7E−07 | 6.0E−07 | 7.4E−07 | 2.3E−07 | 8.6E−07 |
| M103205H795-MY533 | [symbol] 234W/G236T/S239V/H268D/Q295L/A330K | 8.0E−07 | 7.3E−07 | 1.2E−06 | 2.5E−07 | 1.1E−06 |
| M103205H795-MY534 | [symbol] 236T/S239V/H268D/Q295L/A330K | 1.3E−06 | 1.3E−06 | 1.2E−06 | 4.2E−07 | 1.7E−06 |
| M103205H795-MY535 | A231G/L234W/G236T/H268D/A330K | 1.5E−06 | 1.4E−06 | 3.0E−06 | 4.1E−07 | 2.1E−06 |
| M103205H795-MY536 | A231G/L234W/G236T/S239V/H268D/A330K | 1.2E−06 | 1.1E−06 | 9.8E−07 | 4.0E−07 | 1.6E−06 |
| M103205H795-MY537 | A231G/L234W/G236T/S239V/H268D/Q295L/ | 1.2E−06 | 1.1E−06 | 1.4E−06 | 3.2E−07 | 1.5E−06 |
| A330K | | | | | | |
| M103205H795-MY538 | A231G/L234W/G236T/H268D/Q295L/A330K | 9.6E−07 | 1.1E−06 | 3.0E−06 | 2.8E−07 | 2.4E−06 |

| | |
|---|---|
| KD (M) for humanFcgRs | KD fold for cynoFcgRs (SG1 = 1) |

| Heavy chain name | FcgRIIaH | FcgRIIaR | FcgRIIb | FcgRIIIaV | FcgRIIa1 | FcgRIIa2 | FcgRIIa3 |
|---|---|---|---|---|---|---|---|
| M103205H795-SG1 | 6.7E−07 | 1.1E−06 | 4.6E−06 | 8.1E−07 | 1.0 | 1.0 | 1.0 |
| M103205H795-MY209 | 5.7E−07 | 8.8E−07 | 5.0E−07 | 1.4E−05 | 5.1 | 7.4 | 8.9 |
| M103205H795-MY340 | 3.1E−07 | 8.3E−07 | 3.3E−06 | 1.7E−05 | 0.7 | 1.0 | 0.7 |
| M103205H795-MY341 | 2.6E−07 | 4.2E−07 | 1.8E−06 | 7.0E−06 | 1.2 | 1.8 | 1.9 |
| M103205H795-MY342 | 3.7E−07 | 1.0E−06 | 3.9E−06 | 2.5E−05 | 0.6 | 0.6 | 0.3 |
| M103205H795-MY283 | 1.4E−07 | 3.5E−07 | 1.8E−06 | 5.7E−06 | 2.3 | 3.2 | 3.9 |
| M103205H795-MY339 | 4.1E−07 | 6.3E−07 | 2.8E−06 | 5.6E−06 | 0.9 | 1.7 | 1.7 |
| M103205H795-MY380 | 4.5E−07 | 8.5E−07 | 4.8E−07 | 1.0E−09 | 3.4 | 5.1 | 5.2 |
| M103205H795-MY388 | 8.1E−07 | 1.7E−06 | 4.6E−06 | 2.4E−09 | 0.6 | 0.9 | 1.1 |
| M103205H795-MY388 | 3.3E−07 | 2.3E−07 | 1.5E−06 | 4.3E−06 | 1.9 | 3.0 | 13.1 |
| M103205H795-MY389 | 2.7E−07 | 1.9E−07 | 1.1E−06 | 3.5E−06 | 1.6 | 3.2 | 12.1 |
| M103205H795-MY400 | 4.2E−07 | 7.4E−07 | 2.5E−06 | 7.8E−06 | 1.8 | 2.3 | 4.5 |
| M103205H795-MY392 | 4.3E−07 | 4.1E−07 | 1.7E−06 | 9.3E−06 | 10.7 | 2.2 | 4.4 |
| M103205H795-MY387 | 2.4E−07 | 2.0E−07 | 1.6E−06 | 4.7E−06 | 1.4 | 2.7 | 12.1 |
| M103205H795-MY514 | 3.5E−07 | 1.6E−07 | 6.9E−07 | 8.8E−06 | 12.3 | 3.2 | 11.3 |
| M103205H795-MY515 | 2.2E−07 | 2.6E−07 | 1.2E−06 | 9.0E−06 | 22.9 | 3.2 | 5.9 |
| M103205H795-MY516 | 2.2E−07 | 8.5E−08 | 5.1E−07 | 6.7E−06 | 21.3 | 3.9 | 21.5 |
| M103205H795-MY520 | 4.9E−07 | 3.4E−07 | 1.4E−06 | 3.5E−06 | 1.3 | 2.2 | 8.1 |
| M103205H795-MY521 | 2.9E−07 | 3.0E−07 | 1.5E−06 | 5.1E−06 | 1.3 | 1.5 | 3.9 |
| M103205H795-MY522 | 2.4E−07 | 1.7E−07 | 1.1E−06 | 5.7E−06 | 1.9 | 4.3 | 18.3 |
| M103205H795-MY523 | 1.9E−07 | 2.1E−07 | 1.1E−06 | 5.5E−06 | 2.3 | 3.9 | 15.5 |
| M103205H795-MY524 | 1.1E−07 | 2.8E−07 | 1.0E−06 | 4.5E−06 | 3.2 | 4.6 | 6.3 |
| M103205H795-MY525 | 2.1E−07 | 1.6E−07 | 1.2E−06 | 4.3E−06 | 2.0 | 4.6 | 15.5 |
| M103205H795-MY526 | 1.7E−07 | 2.1E−07 | 1.2E−06 | 4.3E−06 | 2.5 | 4.3 | 13.1 |
| M103205H795-MY527 | 1.1E−07 | 2.9E−07 | 1.4E−06 | 4.5E−06 | 2.9 | 3.9 | 5.0 |
| M103205H795-MY528 | 3.5E−07 | 5.6E−07 | 2.2E−06 | 4.2E−06 | 2.3 | 3.4 | 5.3 |
| M103205H795-MY529 | 2.3E−07 | 5.3E−07 | 1.4E−06 | 4.0E−06 | 3.2 | 3.6 | 5.3 |
| M103205H795-MY530 | 1.7E−07 | 2.7E−07 | 1.6E−06 | 3.6E−06 | 2.5 | 4.6 | 6.8 |
| M103205H795-MY531 | 2.9E−07 | 4.1E−07 | 1.5E−06 | 2.9E−06 | 2.9 | 5.5 | 7.7 |
| M103205H795-MY532 | 2.1E−07 | 1.9E−07 | 8.3E−07 | 1.7E−06 | 4.2 | 8.5 | 23.0 |
| M103205H795-MY533 | 2.1E−07 | 2.0E−07 | 9.5E−07 | 1.8E−06 | 4.0 | 7.0 | 14.2 |
| M103205H795-MY534 | 1.7E−07 | 1.9E−07 | 1.2E−06 | 4.3E−06 | 2.5 | 3.5 | 14.2 |
| M103205H795-MY535 | 3.9E−07 | 6.4E−07 | 1.9E−06 | 5.2E−06 | 2.1 | 3.6 | 5.7 |
| M103205H795-MY536 | 2.9E−07 | 2.2E−07 | 9.9E−07 | 2.7E−06 | 2.7 | 4.6 | 17.3 |
| M103205H795-MY537 | 2.8E−07 | 3.7E−07 | 1.0E−06 | 3.3E−06 | 2.7 | 4.6 | 12.1 |
| M103205H795-MY538 | 2.5E−07 | 6.2E−07 | 1.3E−06 | 5.7E−06 | 3.3 | 4.6 | 5.7 |

| | KD fold for | | | | | |
|---|---|---|---|---|---|---|
| | cynoFcgRs | | | | | |
| | (SG1 = 1) | | KD fold for humanFcgRs (SG1 = 1) | | | |
| Heavy chain name | FcgRIIb | FcgRIIIaS | FcgRIIaH | FcgRIIaR | FcgRIIb | FcgRIIIaV |
| M103205H795-SG1 | 1.0 | 1.00 | 1.0 | 1.0 | 1.0 | 1.00 |
| M103205H795-MY209 | 9.5 | 0.16 | 1.2 | 1.3 | 9.2 | 0.06 |
| M103205H795-MY340 | 1.6 | 0.16 | 2.2 | 1.3 | 1.4 | 0.05 |
| M103205H795-MY341 | 3.0 | 0.38 | 2.7 | 2.6 | 2.6 | 0.12 |
| M103205H795-MY342 | 1.4 | 0.14 | 1.9 | 1.1 | 1.2 | 0.09 |
| M103205H795-MY283 | 4.3 | 0.16 | 4.9 | 3.1 | 2.6 | 0.14 |
| M103205H795-MY339 | 2.4 | 0.47 | 1.7 | 1.7 | 1.6 | 0.14 |
| M103205H795-MY380 | 6.2 | 0.13 | 1.5 | 1.3 | 9.6 | 0.08 |
| M103205H795-MY388 | 1.1 | 0.14 | 0.9 | 0.6 | 1.0 | 0.03 |
| M103205H795-MY388 | 2.4 | 0.23 | 2.1 | 4.8 | 3.1 | 0.19 |
| M103205H795-MY389 | 2.6 | 0.24 | 2.6 | 5.8 | 4.2 | 0.23 |
| M103205H795-MY400 | 2.9 | 0.15 | 1.6 | 1.5 | 1.8 | 0.10 |
| M103205H795-MY392 | 2.6 | 0.09 | 1.6 | 2.7 | 2.7 | 0.09 |
| M103205H795-MY387 | 2.7 | 0.14 | 2.9 | 5.5 | 2.9 | 0.17 |
| M103205H795-MY514 | 2.6 | 0.05 | 2.0 | 6.9 | 6.7 | 0.09 |
| M103205H795-MY515 | 4.6 | 0.09 | 3.1 | 4.2 | 3.8 | 0.09 |
| M103205H795-MY516 | 4.0 | 0.12 | 3.1 | 12.9 | 9.0 | 0.12 |
| M103205H795-MY520 | 1.5 | 0.18 | 1.4 | 3.2 | 3.3 | 0.23 |
| M103205H795-MY521 | 2.3 | 0.16 | 2.4 | 3.7 | 3.1 | 0.16 |
| M103205H795-MY522 | 3.4 | 0.19 | 2.9 | 6.5 | 4.2 | 0.14 |
| M103205H795-MY523 | 3.8 | 0.17 | 3.6 | 5.2 | 4.2 | 0.15 |
| M103205H795-MY524 | 5.8 | 0.18 | 6.3 | 3.9 | 4.6 | 0.18 |
| M103205H795-MY525 | 3.5 | 0.26 | 3.3 | 6.9 | 3.8 | 0.19 |
| M103205H795-MY526 | 3.9 | 0.23 | 4.1 | 5.2 | 3.8 | 0.19 |
| M103205H795-MY527 | 5.3 | 0.24 | 6.3 | 3.8 | 3.3 | 0.18 |
| M103205H795-MY528 | 4.4 | 0.18 | 2.0 | 2.0 | 2.1 | 0.19 |
| M103205H795-MY529 | 5.0 | 0.16 | 3.0 | 2.1 | 3.3 | 0.20 |
| M103205H795-MY530 | 5.6 | 0.42 | 4.1 | 4.1 | 2.9 | 0.23 |
| M103205H795-MY531 | 6.7 | 0.36 | 2.4 | 2.7 | 3.1 | 0.28 |
| M103205H795-MY532 | 7.8 | 0.42 | 3.3 | 5.8 | 5.5 | 0.48 |
| M103205H795-MY533 | 7.7 | 0.33 | 3.3 | 5.5 | 4.8 | 0.45 |
| M103205H795-MY534 | 4.3 | 0.22 | 4.1 | 5.8 | 3.8 | 0.15 |
| M103205H795-MY535 | 4.4 | 0.17 | 1.8 | 1.7 | 2.4 | 0.16 |
| M103205H795-MY536 | 4.5 | 0.23 | 2.4 | 5.0 | 4.6 | 0.30 |
| M103205H795-MY537 | 5.6 | 0.24 | 2.5 | 3.0 | 4.6 | 0.25 |
| M103205H795-MY538 | 6.4 | 0.25 | 2.8 | 1.8 | 3.5 | 0.14 |

[symbol]

indicates data missing or illegible when filed

TABLE 24
Binding profile of the variants tested in all human FcγR transgenic mice

| | | | | | | | | | KD (M) for | |
|---|---|---|---|---|---|---|---|---|---|---|
| | | SEQ ID | | KD (M) for cynoFcgRs | | | | | humanFcgRs | |
| Heavy chain name | CH | NO | Substitutions | FcgRIIa1 | FcgRIIa2 | FcgRIIa3 | FcgRIIb | FcgRIIIaS | FcgRIIaH | FcgRIIaR |
| M103205H795- | SG1 | 9 | — | 3.2E−06 | 3.2E−06 | 1.7E−05 | 1.8E−06 | 1.6E−07 | 6.5E−07 | 1.2E−06 |
| SG1 | | | | | | | | | | |
| M103205H795- | MY101 | 229 | G236N/H268D/A330K/ | 1.1E−06 | 1.2E−06 | 3.5E−05 | 3.5E−07 | 1.2E−06 | 4.3E−07 | 2.7E−07 |
| MY101 | | | P396M | | | | | | | |
| M103205H795-PK2 | PK2 | 230 | G236N/H268D/A330K/ | 1.3E−06 | 2.3E−06 | 1.3E−05 | 3.2E−07 | 2.9E−06 | 5.7E−07 | 2.1E−06 |
| | | | P396M/S400R/D213K | | | | | | | |
| M103205H795- | MY201 | 231 | G236N/H268D/A330K | 1.4E−06 | 2.4E−06 | 2.9E−06 | 4.3E−07 | 5.7E−06 | 9.1E−07 | 1.9E−06 |
| MY201 | | | | | | | | | | |
| M103205H795- | MY352 | 232 | G236N/H268D/Q311R/ | 9.2E−07 | 7.6E−06 | 1.5E−06 | 3.5E−07 | 3.2E−06 | 3.0E−06 | 1.6E−06 |
| MY352 | | | A330K/D213K | | | | | | | |
| M103205H795- | MY205 | 233 | G236N/H268D/Q295L/ | 9.0E−07 | 1.1E−06 | 3.0E−06 | 2.5E−07 | 6.0E−06 | 4.7E−07 | 1.3E−06 |
| MY205 | | | A330K | | | | | | | |
| M103205H795- | MY144 | 234 | G236N/H268D/Q295L/ | 6.3E−07 | 1.1E−06 | 2.2E−06 | 3.1E−07 | 4.9E−06 | 0.7E−07 | 3.2E−06 |
| MY144 | | | Q111R/A330K/D213K | | | | | | | |
| M103205H795- | MY135 | 235 | G236T/H268D/Q311R/ | 2.0E−06 | 1.7E−06 | 2.7E−06 | 6.5E−06 | 1.5E−06 | 2.5E−07 | 2.9E−07 |
| MY135 | | | A330K/D213K | | | | | | | |

| | KD (M) for | | | | | | | | | | |
|---|---|---|---|---|---|---|---|---|---|---|---|
| | humanFcgRs | | KD fold for cynoFcgRs (SG1 = 1) | | | | | KD fold for humanFcgRs (SG1 = 1) | | | |
| Heavy chain name | FcgRIIb | FcgRIIIaV | FcgRIIa1 | FcgRIIa2 | FcgRIIa3 | FcgRIIb | FcgRIIIaS | FcgRIIaH | FcgRIIaR | FcgRIIb | FcgRIIIaV |
| M103205H795- | 4.6E−06 | 8.1E−07 | 1.0 | 1.0 | 1.0 | 1.0 | 1.00 | 1.0 | 1.0 | 1.0 | 1.00 |
| SG1 | | | | | | | | | | | |
| M103205H795- | 4.9E−07 | 1.1E−06 | 2.5 | 1.3 | 4.7 | 5.0 | 0.11 | 1.0 | 1.3 | 9.4 | 0.07 |
| MY101 | | | | | | | | | | | |
| M103205H795-PK2 | 5.9E−07 | 1.3E−05 | 2.5 | 2.9 | 4.5 | 4.2 | 0.09 | 1.2 | 1.0 | 7.5 | 0.09 |
| M103205H795- | 1.1E−06 | 2.4E−05 | 2.3 | 3.6 | 4.4 | 4.2 | 0.06 | 0.5 | 0.6 | 4.2 | 0.03 |
| MY201 | | | | | | | | | | | |
| M103205H795- | 2.2E−06 | 1.4E−05 | 1.5 | 6.7 | 8.9 | 5.1 | 0.07 | 0.7 | 0.7 | 1.8 | 0.06 |
| MY352 | | | | | | | | | | | |
| M103205H795- | 5.6E−07 | 1.3E−05 | 3.6 | 4.6 | 5.2 | 7.2 | 0.06 | 1.5 | 0.8 | 8.3 | 0.06 |
| MY205 | | | | | | | | | | | |
| M103205H795- | 7.2E−07 | 1.9E−06 | 2.6 | 4.6 | 7.3 | 5.0 | 0.07 | 1.0 | 0.9 | 6.4 | 0.04 |
| MY144 | | | | | | | | | | | |
| M103205H795- | 2.3E−06 | 3.0E−06 | 1.0 | 3.0 | 6.3 | 2.0 | 0.24 | 2.4 | 1.0 | 2.0 | 0.10 |
| MY135 | | | | | | | | | | | |

### Example 28

### Evaluation of Clearance of Myostatin Using FcγRIIb-Enhanced Fc Variants in all Human FcγR Transgenic Mice

[0671] The effect of clearance of myostatin by FcγRIIb-enhanced Fc variant constructed in Example 27 was evaluated in a mouse in which all murine FcγRs have been deleted and human FcγRs, encoded as transgenes, have been inserted into the mouse genome (Proc. Natl. Acad. Sci., 2012, 109, 6181). In this mice all mouse FcγRs are substituted with human ones so that the effect of affinity enhancement to human FcγRIIb on clearance of soluble antigen can be evaluated in mouse. Furthermore, pI-increasing substitutions were evaluated in combination with FcγRIIb-enhanced Fc variants constructed in Example 27.

### Preparation and Profile of Tested Variants

[0672] The tested 8 antibodies and their binding profiles are summarized in Table 24. The heavy chain, MS103205H795-PK2, was prepared by introducing pI-increasing substitutions (S400R/D413K) into MS103205H795-MY101. MS103205H795-MY351, MS103205H795-MY344, MS103205H795-MY335 were prepared by introducing another pI-increasing substitutions (Q311R/D413K) into MS103205H795-MY201, MS103205H795-MY205, MS103205H795-MY265, respectively. All the MS1032LO06 variants were expressed with M103202L889-SK1 as light chain according to the method shown in Example 27 and their affinities to human and cynoFcγRs were evaluated using the method in Example 27.

[0673] Based on the SPR analysis summarized in Table 24, it was confirmed that the pI-increasing substitutions do not affect the FcγR binding of FcγRIIb-enhanced Fc variants. MY101 and PK2, which was prepared by introducing S400R/D413K into MY101, show 9-fold and 8-fold enhanced human FcγRIIb binding, respectively. The affinities of MY101 and PK2 to human FcγRIIa are remained comparable to SG1. With respect to other human and cynoFcγRs, they show almost the same binding profile. Similarly, MY351 showed similar binding profile with that of parent MY201, MY344 with that of parent MY205, and MY335 with that of parent MY265 (Table 21), respectively. These results indicate that either pair of pI-increasing substitutions, S400R/D413K or Q311R/D413K, does not affect the affinities to human and cynoFcγRs.

### PK Study in all Human FcγR Transgenic Mice

### In Vivo Test Using all Human FcγR Transgenic Mice

[0674] The elimination of myostatin and anti-latent myostatin antibody were assessed in vivo upon co-administration of anti-latent myostatin antibody and human latent myostatin in all human FcγR transgenic mice (FIGS. 24 and 25). An anti-latent myostatin antibody (0.3 mg/ml) and latent myostatin (0.05 mg/ml) were administered at a single dose of 10 ml/kg into the caudal vein. Anti-CD4 antibody (1 mg/ml) was administered three times (every 10 days) at a dose of 10 ml/kg into the caudal vein to suppress anti-drug antibody. Blood was collected at 5 minutes, 15 minutes, 1 hour, 4 hours, 7 hours, 1 day, 2 days, 7 days, 14 days, 21 days, and 28 days after administration. The collected blood was centrifuged immediately at 15,000 rpm in 4° C. for 5 minutes to separate the plasma. The separated plasma was stored at or below −20° C. until measurement. The anti-latent myostatin antibodies used were MS1032LO06-SG1, MS1032LO06-MY101, MS1032LO06-PK2, MS1032LO06-MY201, MS1032LO06-MY351, MS1032LO06-MY205, MS1032LO06-MY344 and MS1032LO06-MY335.

### Measurement of Total Myostatin Concentration in Plasma by Electrochemiluminescence (ECL)

[0675] The concentration of total myostatin in mouse plasma was measured by ECL. Anti-mature myostatin antibody-immobilized plates were prepared by dispensing anti-mature myostatin antibody RK35 (WO 2009058346) onto a MULTI-ARRAY 96-well plate (Meso Scale Discovery) and incubated overnight at 4° C. Mature myostatin calibration curve samples and mouse plasma samples diluted 4-fold or more were prepared. The samples were mixed in an acidic solution (0.2 M Glycine-HCl, pH2.5) to dissociate mature myostatin from its binding protein (such as propeptide). Subsequently, the samples were added onto an anti-mature myostatin antibody-immobilized plate, and allowed to bind for 1 hour at room temperature before washing. Next, BIOTIN TAG labelled anti-mature myostatin antibody RK22 (WO 2009/058346) was added and the plate was incubated for 1 hour at room temperature before washing. Next, SULFO TAG labelled streptavidin (Meso Scale Discovery) was added and the plate was incubated for 1 hour at room temperature before washing. Read Buffer T (×4) (Meso Scale Discovery) was immediately added to the plate and signal was detected by SECTOR Imager 2400 (Meso Scale Discovery). The mature myostatin concentration was calculated based on the response of the calibration curve using the analytical software SOFTmax PRO (Molecular Devices). The time course of total myostatin concentration in plasma after intravenous administration of anti-latent myostatin antibody and latent myostatin measured by this method is shown in FIG. 24.

### Measurement of Anti-Latent Myostatin Antibody Concentration in Plasma by High-Performance Liquid Chromatography-Electrospray Tandem Mass Spectrometry (LC/ESI-MS/MS)

[0676] Anti-latent myostatin antibody concentration in mouse plasma was measured by LC/ESI-MS/MS. The concentrations of calibration standards were 1.56 25, 3.125, 6.25, 12.5, 25, 50, 100, and 200 μg/mL in mice plasma. Three μL of the calibration standards and plasma samples were added to 50 μL of Ab-Capture Mag (ProteNova), and allowed to incubate for 2 hours at room temperature. Afterward, the magnetic beads were recovered from samples and washed twice with 0.2 mL of 10 mmol/L PBS with 0.05% Tween 20. Subsequently, the magnetic beads were washed with 10 mmol/L PBS to ensure the removal of Tween 20. After washing, the magnetic beads were suspended in 25 μL of 7.5 mol/L Urea, 8 mmol/L dithiothreitol and 1 μg/mL lysozyme (chicken egg white) in 50 mmol/L ammonium bicarbonate and the suspended samples were incubated for 45 minutes at 56° C. Then, 2 μL of 500 mmol/L iodoacetoamide was added and the samples were incubated for 30 minutes at 37° C. in the dark. Next, Lysyl Endopeptidase digestion was carried out by adding 150 μL of 0.67 μg/mL Lysyl Endopeptidase for Biochemistry (Wako) in 50 mmol/L ammonium bicarbonate and the samples were incubated for 3 hr at 37° C. Subsequently, tryptic digestion was carried out by adding 10 μL of 10 μg/mL sequencing grade modified trypsin (Promega) in 50 mmol/L ammonium bicarbonate. Samples were allowed to digest under mixing overnight at 37° C., and quenched by adding 5 μL of 10% trifluoroacetic acid. Fifty μL of digestion samples were subjected to analysis by LC/ESI-MS/MS. LC/ESI-MS/MS was performed using Xevo TQ-S triple quadrupole instrument (Waters) equipped with 2D I-class UPLC (Waters). Anti-latent myostatin antibody specific peptide YAFGQGTK and Lysozyme specific peptide GTDVQAWIR as an internal standard were monitored by the selected reaction monitoring (SRM). SRM transition was [M+2H]2+(m/z 436.2) to y8 ion (m/z 637.3) for anti-latent myostatin antibody, and [M+2H]2+(m/z 523.3) to y8 ion (m/z 545.3) for lysozyme. Internal calibration curve was constructed by the weighted (l/x or l/x2) linear regression using the peak area plotted against the concentrations. The concentration in mouse plasma was calculated from the calibration curve using the analytical software Masslynx Ver.4.1 (Waters). The time course of antibody concentration in plasma after intravenous administration of anti-latent myostatin antibody and latent myostatin measured by this method is shown in FIG. 25.

### Effect of pI and FcγR Binding on Myostatin Concentration In Vivo

[0677] After administration of MS1032LO06-SG1, plasma total myostatin concentration at 7 hours decreased 5 fold compared to plasma total myostatin concentration at 5 minutes. In contrast, after administration of MS1032LO06-MY101, MS1032LO06-MY201 and MS1032LO06-MY205, plasma total myostatin concentration at 7 hours decreased 28-200 fold compared to plasma total myostatin concentration at 5 minutes. Furthermore, after administration of MS1032LO06-PK2, MS1032LO06-MY351, MS1032LO06-MY344 and MS1032LO06-MY335, plasma total myostatin concentration at 7 hours decreased 361-419 fold compared to plasma total myostatin concentration at 5 minutes. On the other hands, the difference in each antibody's concentration at each sampling point compared to MS1032LO06-SG1's was approximately within 2 fold, and pI variants did not increase antibody elimination from plasma. Both human FcγRIIb binding enhanced antibodies and pI-increasing substitutions increased elimination of myostatin, but not antibodies. High pI variants have more positive charge in plasma. Since this positive charge interacts with cell surface of negative charge, antigen-antibody immune complex of high pI variants get closer to cell surface, resulted in increased cellular uptake of antigen-antibody immune complex of high pI variants.

### Example 29

### Evaluation of Clearance of Myostatin Using FcγRIIb-Enhanced Fc Variants in Monkey

[0678] The effect of enhanced binding of Fc variants developed in Example 27 to cynoFcγRIIb on myostatin sweeping was evaluated in cynomolgus monkey. And the combination effect with pI-increasing substitutions were also evaluated.

### Preparation and Profile of Tested Variants

[0679] The tested 14 antibodies and their binding profiles are summarized in Table 25. It has been reported that Fc variant with enhanced binding to FcRn at acidic pH improve the antibody half-life in vivo (J. Biol. Chem. 2006 281:23514-23524 (2006); Nat. Biotechnol. 28:157-159 (2010), Clin Pharm. & Thera. 89(2):283-290 (2011)). To improve the antibody half-life without binding to rheumatoid factor we combined these substitutions with FcγRIIb enhanced and pI-increased Fc variants.

[0680] The heavy chain, MS103205H795-SG1012, MS103205H795-SG1029, MS103205 H795-SG1031, MS103205H795-SG1033, MS103205H795-SG1034 were prepared by introducing a N434A substitution into MS103205H795-MY101, MS103205H795-MY344, MS103205H795-MY351, MS103205H795-MY201, MS103205H795-MY335, respectively. MS103205H795-SG1016 was prepared by introducing pI-increasing substitutions (Q311R/D399K) into MS103205H795-SG1012. MS103240H795-SG1071 and MS103240H795-SG1079 were prepared by introducing M428L/N434A/Y436T/Q438R/S440E substitutions and N434A/Q438R/S440E substitutions into MS103240 H795-MY344, respectively, (MS103240H795: VH, SEQ ID NO; 92).

[0681] MS103240H795-SG1074 and MS103240H795-SG1077 were prepared by introducing pI-increasing substitutions Q311R/P343R and M428L/N434A/Y436T/Q438R/S440E substitutions into MS103240H795-MY209 and MS103240H795-MY518, respectively. MS103240H795-SG1080 and MS103240H795-SG1081 were prepared by introducing pI-increasing substitutions Q311R/P343R and N434A/Q438R/S440E substitutions into MS103240H795-MY209 and MS103240H795-MY518, respectively. MS103240H795-SG1071 was prepared by introducing pI-increasing substitutions Q311R/D413K and M428L/N434A/Y436T/Q438R/S440E substitutions into MS103240H795-MY205. MS103240H795-SG1079 was prepared by introducing pI-increasing substitutions Q311R/D413K and N434A/Q438R/S440E substitutions into MS103240H795-MY205. These MS1032LO06 variants and MS1032LO19 variants were expressed with M103202L889-SK1 and M103202L1045-SK1, respectively, (M103202L1045: VL, SEQ ID NO: 97) as light chain according to the method shown in Example 34 and their affinities to human and cynoFcγRs were evaluated using the method in Example 27. In this example, the value of KD fold for each Fc variant was calculated by dividing the KD value of the parent SG1 by the KD value of the variant for each FcγR. For example, the value of KD fold for MS1032LO06-SG1012 and MS1032LO19-SG1071 were calculated by divinding the KD value of MS1032LO06-SG1 and MS1032LO19-SG1 by the KD value of MS1032LO06-SG1012 and MS1032LO19-SG1071, respectively.

TABLE 25

| | | | | KD (M) for cynoFcgRs | | | | | KD (M) for humanFcgRs | | | |
|---|---|---|---|---|---|---|---|---|---|---|---|---|
| Heavy chain name | CH | SEQ ID NO. | [symbol] | FcgRIIa1 | FcgRIIa2 | FcgRIIa3 | FcgRIIb | FcgRIIIaS | FcgRIIaH | FcgRIIaR | FcgRIIb | FcgRIIIaV |
| [symbol] | [symbol] | 9 | — | [symbol] | [symbol] | [symbol] | [symbol] | [symbol] | [symbol] | [symbol] | [symbol] | [symbol] |
| [symbol] | [symbol] | [symbol] | [symbol] | [symbol] | [symbol] | [symbol] | [symbol] | [symbol] | [symbol] | [symbol] | [symbol] | [symbol] |
| [symbol] | [symbol] | 237 | [symbol] | [symbol] | [symbol] | [symbol] | [symbol] | [symbol] | [symbol] | [symbol] | [symbol] | [symbol] |
| [symbol] | [symbol] | 358 | [symbol] | [symbol] | [symbol] | [symbol] | [symbol] | [symbol] | [symbol] | [symbol] | [symbol] | [symbol] |
| [symbol] | [symbol] | 229 | [symbol] | [symbol] | [symbol] | [symbol] | [symbol] | [symbol] | [symbol] | [symbol] | [symbol] | [symbol] |
| [symbol] | [symbol] | 240 | [symbol] | [symbol] | [symbol] | [symbol] | [symbol] | [symbol] | [symbol] | [symbol] | [symbol] | [symbol] |
| [symbol] | [symbol] | 241 | [symbol] | [symbol] | [symbol] | [symbol] | [symbol] | [symbol] | [symbol] | [symbol] | [symbol] | [symbol] |
| [symbol] | [symbol] | 8 | [symbol] | [symbol] | [symbol] | [symbol] | [symbol] | [symbol] | [symbol] | [symbol] | [symbol] | [symbol] |
| [symbol] | [symbol] | 242 | [symbol] | [symbol] | [symbol] | [symbol] | [symbol] | [symbol] | [symbol] | [symbol] | [symbol] | [symbol] |
| [symbol] | [symbol] | 243 | [symbol] | [symbol] | [symbol] | [symbol] | [symbol] | [symbol] | [symbol] | [symbol] | [symbol] | [symbol] |
| [symbol] | [symbol] | 244 | [symbol] | [symbol] | [symbol] | [symbol] | [symbol] | [symbol] | [symbol] | [symbol] | [symbol] | [symbol] |
| [symbol] | [symbol] | 245 | [symbol] | [symbol] | [symbol] | [symbol] | [symbol] | [symbol] | [symbol] | [symbol] | [symbol] | [symbol] |
| [symbol] | [symbol] | 246 | [symbol] | [symbol] | [symbol] | [symbol] | [symbol] | [symbol] | [symbol] | [symbol] | [symbol] | [symbol] |
| [symbol] | [symbol] | 247 | [symbol] | [symbol] | [symbol] | [symbol] | [symbol] | [symbol] | [symbol] | [symbol] | [symbol] | [symbol] |

| | KD fold for cynoFcgRs (SG1 = 1) | | | | | KD fold for humanFcgRs (SG1 = 1) | | | |
|---|---|---|---|---|---|---|---|---|---|
| Heavy chain name | FcgRIIa1 | FcgRIIa2 | FcgRIIa3 | FcgRIIb | FcgRIIIaS | FcgRIIaH | FcgRIIaR | FcgRIIb | FcgRIIIaV |
| [symbol] | [symbol] | [symbol] | [symbol] | [symbol] | 1.00 | 1.0 | 1.0 | 1.0 | 1.00 |
| [symbol] | [symbol] | [symbol] | [symbol] | [symbol] | 0.11 | 1.8 | 1.4 | 0.5 | 0.11 |
| [symbol] | [symbol] | [symbol] | [symbol] | [symbol] | 0.17 | 1.8 | 1.2 | 0.7 | [symbol] |
| [symbol] | [symbol] | [symbol] | [symbol] | [symbol] | 0.05 | 1.5 | 0.6 | 5.9 | [symbol] |
| [symbol] | [symbol] | [symbol] | [symbol] | [symbol] | 0.05 | 0.7 | 1.7 | 3.2 | [symbol] |
| [symbol] | [symbol] | [symbol] | [symbol] | [symbol] | 0.06 | 0.5 | 1.0 | 1.0 | [symbol] |
| [symbol] | [symbol] | [symbol] | [symbol] | [symbol] | 0.11 | 2.7 | 4.1 | 1.0 | [symbol] |
| [symbol] | [symbol] | [symbol] | [symbol] | [symbol] | 1.00 | 1.0 | 1.0 | 5.8 | [symbol] |
| [symbol] | [symbol] | [symbol] | [symbol] | [symbol] | 0.07 | 1.4 | 0.8 | 5.7 | [symbol] |
| [symbol] | [symbol] | [symbol] | [symbol] | [symbol] | 0.19 | 1.2 | 1.1 | 10.7 | [symbol] |
| [symbol] | [symbol] | [symbol] | [symbol] | [symbol] | 0.09 | 1.0 | 1.4 | 7.5 | [symbol] |
| [symbol] | [symbol] | [symbol] | [symbol] | [symbol] | 0.04 | 1.4 | 0.1 | 5.6 | [symbol] |
| [symbol] | [symbol] | [symbol] | [symbol] | [symbol] | 0.18 | 2.5 | 1.7 | 10.5 | [symbol] |
| [symbol] | [symbol] | [symbol] | [symbol] | [symbol] | 0.09 | 1.0 | 1.4 | 7.7 | [symbol] |

[symbol]

indicates data missing or illegible when filed

[0682] The SPR analysis results are summarized in Table 25. Among these variants, SG1012, SG1016, SG1074 and SG1080 show the strongest affinity to human FcγRIIb, which has 10 fold enhanced affinity to human FcγRIIb compared to SG1.

### PK Study in Monkey

### In Vivo Test Using Cynomolgus Monkey

[0683] The accumulation of endogenous myostatin was assessed in vivo upon administration of an anti-latent myostatin antibody in 2-4 year old Macaca fascicularis (cynomolgus monkey) from Cambodia (Shin Nippon Biomedical Laboratories Ltd., Japan). An anti-latent myostatin antibody was administered at a dose level of 30 mg/kg into the cephalic vein of the forearm using a disposable syringe, extension tube, indwelling needle, and infusion pump. The dosing speed was 30 minutes per body. Blood was collected before the start of dosing and either 5 minutes, 7 hours and 1, 2, 3, 7, 14, 21, 28, 35, 42, 49 and 56 days after the end of dosing, or 5 minutes and 2, 4, and 7 hours and 1, 2, 3, 7, 14, 21, 28, 35, 42, 49 and 56 days after the end of dosing. Blood was drawn from the femoral vein with a syringe containing heparin sodium. The blood was immediately cooled on ice, and plasma was obtained by centrifugation at 4° C., 1700×g for 10 minutes. The plasma samples were stored in a deep freezer (acceptable range: −70° C. or below) until measurement. The anti-latent myostatin antibodies used were MS1032LO00-SG1, MS1032LO06-SG1012, MS1032LO06-SG1016, MS1032LO06-SG1029, MS1032LO06-SG1031, MS1032LO06-SG1033, and MS1032LO06-SG1034.

[0684] A dose level of 2 mg/kg was administered into the cephalic vein of the forearm or saphenous vein using a disposable syringe, and indwelling needle for the anti-latent myostatin antibodies MS1032LO19-SG1079, MS1032LO19-SG1071, MS1032LO19-SG1080, MS1032LO19-SG1074, MS1032LO19-SG1081, and MS1032LO19-SG1077. Blood was collected before the start of dosing and 5 minutes and 2, 4, and 7 hours and 1, 2, 3, 7, 14 days after the end of dosing. The blood was processed as described above. Plasma samples were stored in a deep freezer (acceptable range: −70° C. or below) until measurement.

### Measurement of Total Myostatin Concentration in Plasma by Electrochemiluminescence (ECL)

[0685] The concentration of total myostatin in monkey plasma was measured by ECL as described in Example 23. The time course of plasma total myostatin concentration after intravenous administration of anti-latent myostatin antibody as measured by this method is shown in FIG. 26.

### Measurement of ADA in Monkey Plasma Using Electrochemiluminescence (ECL)

[0686] Biotinylated drug was coated onto a MULTI-ARRAY 96-well streptavidin plate (Meso Scale Discovery) and incubated in low cross buffer (Candor) for 2 hours at room temperature. Monkey plasma samples were diluted 20 fold in low cross buffer before addition to the plate. Samples were incubated overnight at 4° C. On the next day, the plate was washed thrice with wash buffer before addition of SULFO TAG labelled anti monkey IgG secondary antibody (Thermo Fisher Scientific). After incubating for an hour at room temperature, the plate was washed three times with wash buffer. Read Buffer T (×4) (Meso Scale Discovery) was immediately added to the plate and signal was detected using a SECTOR Imager 2400 (Meso Scale Discovery).

Effect of pH-Dependent and Fc Engineering on Myostatin Accumulation in Monkey In Vivo

[0687] In cynomolgus monkey, the administration of a non pH-dependent anti-latent myostatin antibody (MS1032LO00-SG1) resulted in an at least 60 fold increase in myostatin concentration from baseline at day 28. At day 28, the administration of pH-dependent anti-latent myostatin antibodies MS1032LO06-SG1012 and MS1032LO06-SG1033 resulted in an 3 fold and 8 fold increase in myostatin concentration from baseline, respectively. The strong sweeping of myostatin was mainly contributed by the increase in affinity to cynomolgus monkey FcγRIIb. At day 28, pH-dependent anti-latent myostatin antibodies MS1032LO06-SG1029, MS1032LO06-SG1031 and MS1032LO06-SG1034 could sweep myostatin to below baseline. The reasons for strong myostatin sweeping of MS1032LO06-SG1029, MS1032LO06-SG1031 and MS1032LO06-SG1034 are an increase in non-specific uptake in the cell due to increase in positive charge cluster of the antibody and/or an increase in FcγR-mediated cellular uptake due to enhanced binding to FcγR.

[0688] The administration of the pH-dependent anti-latent myostatin antibodies MS1032LO19-SG1079, MS1032LO19-SG1071, MS1032LO19-SG1080, MS1032LO19-SG1074, MS1032LO19-SG1081 and MS1032LO19-SG1077 reduced myostatin concentration to below the detection limit (<0.25 ng/mL) from day 1 in cynomolgus monkey. On day 14, the concentration of myostatin increased above detectable limit for the antibodies MS1032LO19-SG1079 and MS1032LO19-SG1071, while the concentration of myostatin remained below the detectable limit for the antibodies MS1032LO19-SG1080, MS1032LO19-SG1074, MS1032LO19-SG1081 and MS1032LO19-SG1077. The weaker suppression of MS1032LO19-SG1079 and MS1032LO19-SG1071 antibodies could be due to the differences in pI mutations that are contained in these antibodies.

[0689] The data suggests that strong sweeping of myostatin from the plasma was achieved by mutations in the anti-myostatin antibodies that increase binding to FcγRIIb or that increase the positive charge of the antibody and increase binding to FcγRIIb. It is expected that strong sweeping of myostatin could be achieved in human by combining mutations that increase positive charge of the antibody and increase binding to FcγR.

### Example 30

### Screening of pI-Increased Substitutions to Enhance Clearance of Myostatin

[0690] To enhance the clearance of myostatin, pI increased substitutions in Fc portion of antibody were evaluated in this example. The method of adding amino acid substitutions to the antibody constant region to increase pI is not particularly limited, but for example, it can be performed by the method described in WO 2014/145159. As in the case with the variable region, amino acid substitutions introduced into the constant region are preferably those that decrease the number of negatively charged amino acids (such as aspartic acid and glutamic acid) while increasing the positively charged amino acids (such as arginine and lysine). Furthermore, amino acid substitutions may be introduced at any position in the antibody constant region, and may be a single amino acid substitution or a combination of multiple amino acid substitutions. Without particular limitation, the sites for introducing amino acid substitutions are preferably positions where amino acid side chains may be exposed on the antibody molecule surface. Particularly preferable examples include the method of introducing a combination of multiple amino acid substitutions at such positions that are exposed on the antibody molecule surface. Alternatively, the multiple amino acid substitutions introduced here are preferably positioned so that they are structurally close to each other. Furthermore, without particular limitation, the multiple amino acid substitutions introduced herein are preferably substitutions to positively charged amino acids, so that preferably they result in a state where multiple positive charges are present at structurally proximal positions.

### Preparation and Profile of Tested Variants

[0691] The tested antibodies are summarized in Table 26. The heavy chain, MS103205H795-SG141 was prepared by introducing pI-increasing substitutions Q311R/D399R into MS103205H795-SG1. Other heavy chain variants were also prepared by introducing respective substitutions represented in Table 26 into MS103205H795-SG1. All the MS1032LO06 variants were expressed with M103202L889-SK1 as light chain according to the method shown in Example 34.

Mouse FcγRII-Binding Assay of pI-Increased Fc Variants Using BIACORE®

[0692] Regarding the produced Fc region variant-containing antibodies, binding assays between soluble mouse FcγRII and antigen-antibody complexes were performed using BIACORE® T200 (GE Healthcare). Soluble mouse FcγRII was produced in the form of a His-tagged molecule by a method known to those skilled in the art. An appropriate amount of an anti-His antibody was fixed onto Sensor chip CM5 (GE Healthcare) by the amine coupling method using a His capture kit (GE Healthcare) to capture mouse FcγRII. Next, an antibody-antigen complex and a running buffer (as a reference solution) were injected, and interaction was allowed to take place with the mouse FcγRII captured onto the sensor chip. 20 mM N-(2-Acetamido)-2-aminoethanesulfonic acid, 150 mM NaCl, 1.2 mM CaCl₂, and 0.05% (w/v) Tween 20 at pH7.4 was used as the running buffer, and the respective buffer was also used to dilute the soluble mouse FcγRII. To regenerate the sensor chip, 10 mM glycine-HCl at pH1.5 was used. All measurements were carried out at 25° C. Analyses were performed based on binding (RU) calculated from sensorgrams obtained by the measurements, and relative values when the binding amount of SG1 was defined as 1.00 are shown. To calculate the parameters, the BIACORE® T100 Evaluation Software (GE Healthcare) was used.

TABLE 26
Summary of pI-increased Fc variants

| | | celluar | biscore IC |
|---|---|---|---|
| Heavy chain name | Substitutions | uptake | binding |
| M103205H795-SG1 | | 1.00 | 1.00 |
| M103205H795-SG141 | Q311R/D399R | 4.42 | 1.64 |
| M103205H795-P1378m | Q311R/D413K | 3.43 | 1.21 |
| M103205H795-P1378m | S400R/D413K | 3.86 | 1.23 |
| M103205H795-P1388m | Q311R/S400R/D413K | 6.68 | 1.41 |
| M103205H795-P1484m | Q311R/D312R | 0.00 | 1.33 |
| M103205H795-P1485m | Q311R/N315R | 1.85 | 1.29 |
| M103205H795-P1486m | Q311R/N815R | 1.52 | 1.20 |
| M103205H795-P1487m | Q311R/N384R | 1.23 | 1.46 |
| M103205H795-P1488m | Q311R/N384K | 1.45 | 1.43 |
| M103205H795-P1489m | Q311R/E318K | 1.68 | 1.24 |
| M103205H795-P1490m | Q311R/E318K | 1.33 | 1.28 |
| M103205H795-P1491m | Q311R/E333E | 1.37 | 1.05 |
| M103205H795-P1492m | Q311R/E333K | 1.13 | 0.55 |
| M103205H795-P1493m | Q311R/T335K | 0.99 | 1.10 |
| M103205H795-P1494m | Q311R/T335K | 1.12 | 1.14 |
| M103205H795-P1495m | Q311R/S337R | 1.76 | 1.30 |
| M103205H795-P1496m | Q311R/S337K | 1.69 | 1.28 |
| M103205H795-P1497m | Q311R/Q342R | 1.85 | 1.49 |
| M103205H795-P1498m | Q311R/Q342K | 1.56 | 1.35 |
| M103205H795-P1499m | Q311R/P343R | 3.61 | 1.98 |
| M103205H795-P1500m | Q311R/P343K | 1.62 | 1.32 |
| M103205H795-P1501m | Q311R/D413R | 2.40 | 1.52 |
| M103205H795-P1522m | Q311R/H265R | 2.13 | 1.24 |
| M103205H795-P1523m | Q311R/H265K | 1.91 | 1.19 |
| M103205H795-P1524m | Q311R/G341R | 3.68 | 1.40 |
| M103205H795-P1525m | Q311R/G341K | 3.55 | 1.31 |
| M103205H795-P1526m | Q311R/G885R | 1.20 | 1.04 |
| M103205H795-P1527m | Q311R/G885K | 0.92 | 0.95 |
| M103205H795-P1528m | Q311R/E366K | 3.02 | 1.12 |
| M103205H795-P1529m | Q311R/E366K | 2.86 | 1.08 |
| M103205H795-P1530m | Q311R/N390R | 3.12 | 1.09 |
| M103205H795-P1531m | Q311R/N390K | 2.35 | 1.01 |
| M103205H795-P1532m | Q311R/D401R | 4.16 | 1.23 |
| M103205H795-P1533m | Q311R/D401K | 3.52 | 1.18 |
| M103205H795-P1534m | Q311R/G402K | 3.12 | 1.12 |
| M103205H795-P1535m | Q311R/G402K | 2.49 | 1.11 |
| M103205H795-P1536m | Q311R/G420R | 2.05 | 1.16 |
| M103205H795-P1537m | Q311R/N422E | 2.77 | 1.32 |
| M103205H795-P1538m | Q311R/N422K | 1.64 | 1.11 |
| M103205H795-P1539m | Q311R/A413R | 8.20 | 0.90 |
| M103205H795-P1540m | D401R/D413K | 7.64 | 1.73 |
| M103205H795-P1541m | D401K/D413K | 7.17 | 1.57 |
| M103205H795-P1542m | G402K/D413K | 3.22 | 1.21 |
| M103205H795-P1543m | G402K/D413K | 3.70 | 1.19 |
| M103205H795-P1544m | Q311R/D401R/D413K | 7.66 | 2.04 |
| M103205H795-P1545m | Q311R/D401K/D413K | 7.78 | 1.80 |
| M103205H795-P1546m | Q311R/G402R/D413K | 5.10 | 1.41 |
| M103205H795-P1547m | Q311R/G402K/D413K | 4.85 | 1.33 |
| M103205H795-P1548m | Q311R/G355R/D401R | 2.80 | 1.37 |
| M103205H795-P1549m | Q311R/G355R/G402R | 2.03 | 1.22 |
| M103205H795-P1550m | Q311R/E386R/D401R | 6.43 | 1.68 |
| M103205H795-P1551m | Q311R/E386R/G402R | 2.91 | 1.33 |
| M103205H795-P1552m | G385R/D401R/D413K | 4.44 | 2.19 |
| M103205H795-P1553m | G385R/G402R/D413K | 2.86 | 1.47 |
| M103205H795-P1555m | E888R/G4402R/D413K | 3.71 | 2.01 |

[0693] The SPR analysis results are summarized in Table 26. A few Fc variants were shown to have enhanced affinity toward mouse FcγRII fixed on the BIACORE® sensor chip.

[0694] While not being restricted to a particular theory, this result can be explained as follows. The BIACORE® sensor chip is known to be negatively charged, and this charged state can be considered to resemble the cell membrane surface. More specifically, the affinity of an antigen-antibody complex for mouse FcγRII fixed onto the negatively charged BIACORE® sensor chip is surmised to resemble the manner in which the antigen-antibody complex binds to mouse FcγRII present on a similarly negatively charged cell membrane surface.

[0695] Here, the antibodies produced by introducing pI-increasing modifications into the Fc region are antibodies in which the charge of the Fc region is more towards the positive side when compared with before introduction of the modifications. Therefore, the Coulombic interaction between the Fc region (positive charge) and the sensor chip surface (negative charge) can be considered to have been strengthened by the pI-increasing amino acid modifications. Furthermore, such effects are expected to take place similarly on the same negatively charged cell membrane surface; therefore, they are also expected to show an effect of accelerating the speed of uptake into cells in vivo.

[0696] Among the pI increased Fc variants with two amino acid substitution from SG1, the antigen-antibody complex made by SG141, P1499m, P1501 m and P1540m shows highest binding to human FcγRIIb. The amino acid substitutions on Q311R/D399R, Q311R/P343R, Q311R/D413R and D401R/D413K are supposed to have strong charge effect on binding to human FcγRIIb on the sensor chip.

Cellular Uptake of pI-Increased Fc Variants

[0697] To evaluate the rate of intracellular uptake into a human FcγRIIb-expressing cell line, following assay was performed. An MDCK (Madin-Darby canine kidney) cell line that constitutively expresses human FcγRIIb was produced by known methods. Using these cells, intracellular uptake of antigen-antibody complexes was evaluated.

[0698] Specifically, pHrodoRed (Life Technologies) was used to label human latent Myostatin (antigen) according to an established protocol, and antigen-antibody complexes were formed in a culture solution with the antibody concentration being 10 mg/mL and the antigen concentration being 2.5 mg/mL. The culture solution containing the antigen-antibody complexes was added to culture plates of the above-mentioned MDCK cells which constitutively express human FcγRIIb and incubated for one hour, and then the fluorescence intensity of the antigen taken up into the cells was quantified using InCell Analyzer 6000 (GE healthcare). The amount of antigen taken up was presented as relative values to the SG1 value which is taken as 1.00.

[0699] The quantification results of cellular uptake were summarized in Table 26. Strong fluorescence derived from the antigen in the cells was observed in several Fc variants.

[0700] While not being restricted to a particular theory, this result can be explained as follows.

[0701] The antigen and antibodies added to the cell culture solution form antigen-antibody complexes in the culture solution. The antigen-antibody complexes bind to human FcγRIIb expressed on the cell membrane via the antibody Fc region, and are taken up into the cells in a receptor-dependent manner. Antibodies used in this experiment binds to antigen in a pH-dependent manner; therefore, the antibody can dissociate from the antigen in the endosomes (acidic pH conditions) inside the cells. Since the dissociated antigen is labeled with pHrodoRed as described earlier, it fluoresces in the endosomes. Thus, a strong fluorescence intensity inside the cell is thought to indicate that the uptake of the antigen-antibody complexes into the cells is taking place more quickly or in larger amounts.

[0702] Among the pI increased Fc variants with two amino acid substitution from SG1, the antigen-antibody complex made by SG141, P1375m, P1378m, P1499m, P1524m, P1525m, P1532m, P1533m, P1540m, P1541m and P1543m shows stronger antigen uptake into the cells. The amino acid substitutions on Q311R/D399R, Q311R/D413K, S400R/D413K, Q311R/P343R, Q311R/G341R, Q311R/G341K, Q311R/D401R, Q311R/D401K, D401R/D413K, D401K/D413K and G402K/D413K are supposed to have strong charge effect on antigen antibody complex uptake into the cells.

### PK Study in Human FcRn Transgenic Mouse

### In Vivo Test Using Human FcRn Transgenic Mice

[0703] The elimination of myostatin and anti-latent myostatin antibody were assessed in vivo upon co-administration of anti-latent myostatin antibody and latent myostatin in human FcRn transgenic mice in which mouse FcRn was substituted with human FcRn. An anti-latent myostatin antibody (0.1 mg/ml) and mouse latent myostatin (0.05 mg/ml) were administered at a single dose of 10 ml/kg into the caudal vein in the experiment PK-2 (described in FIG. 27). An anti-latent myostatin antibody (0.3 mg/ml), human latent myostatin (0.05 mg/ml) and human normal immunoglobulin (CSL Behring AG) (100 mg/ml) were administered at a single dose of 10 ml/kg into the caudal vein in the experiment PK-4 (described in FIG. 28). Blood was collected at 5 minutes, 15 min, 1 hour, 4 hours, 7 hours, 1 day, 2 days, 7 days, 14 days, 21 days, and 28 days after administration in the experiment PK-2. Blood was collected at 5 minutes, 1 hour, 4 hours, 7 hours, 1 day, 7 days, 14 days, 21 days, and 30 days after administration in the experiment PK-4. The collected blood was centrifuged immediately at 15,000 rpm in 4° C. for 5 minutes to separate the plasma. The separated plasma was stored at or below −20° C. until measurement. The anti-latent myostatin antibodies used were MS1032LO06-SG1, MS1032LO06-P1375m, MS1032LO06-P1378m, MS1032LO06-P1383 m in the experiment PK-2, and MS1032LO06-P1375m, MS1032LO06-P1499m in the experiment PK-4.

### Measurement of Total Myostatin Concentration in Plasma by Electrochemiluminescence (ECL)

[0704] The concentration of total myostatin in mouse plasma was measured by ECL as described in Example 28 (Ravetch PK). The time course of total myostatin concentration in plasma after intravenous administration of anti-latent myostatin antibody and latent myostatin measured by this method is shown in FIGS. 27A and 28A.

### Measurement of Anti-Latent Myostatin Antibody Concentration in Plasma by Enzyme-Linked Immunosorbent Assay (ELISA)

[0705] The concentration of anti-latent myostatin antibody in mouse plasma was measured by ELISA in the experiment PK-2. Anti-human IgG (γ-chain specific) F(ab′)2 antibody fragment (Sigma) was dispensed onto a Nunc-ImmunoPlate MaxiSorp (Nalge Nunc International) and allowed to stand overnight at 4° C. to prepare anti-human IgG-immobilized plates. Calibration curve samples having plasma concentrations of 2.5, 1.25, 0.625, 0.313, 0.156, 0.078, and 0.039 μg/ml, and mouse plasma samples diluted 100-fold or more were prepared. Then, the samples were dispensed onto the anti-human IgG-immobilized plates, and allowed to stand for 1 hour at room temperature. Subsequently, Goat Anti-Human IgG (γ-chain specific) Biotin conjugate (Southern Biotech) was added to react for 1 hour at room temperature. Then, Streptavidin-PolyHRP80 (Stereospecific Detection Technologies) was added to react for one hour at room temperature, and chromogenic reaction was carried out using TMB One Component HRP Microwell Substrate (BioFX Laboratories) as a substrate. After stopping the reaction with 1 N sulfuric acid (Showa Chemical), the absorbance at 450 nm was measured by a microplate reader. The concentration in mouse plasma was calculated from the absorbance of the calibration curve using the analytical software SOFTmax PRO (Molecular Devices). The time course of antibody concentration in plasma after intravenous administration of anti-latent myostatin antibody and latent myostatin measured by this method is shown in FIG. 27B.

[0706] The concentration of anti-latent myostatin antibody in mouse plasma was measured by a Gyrolab Bioaffy™ CD (Gyros) in the experiment PK-4. Biotinylated anti-human IgG Fc antibody was flowed over the streptavidin bead column within the microstructure of the CDs. Calibration curve samples having plasma concentrations of 0.5, 1, 2, 4, 8, 16, and 32 μg/ml spiking plasma concentrations of 5 mg/mL of human normal immunoglobulin (CSL Behring AG) and 200 μg/ml of mouse latent myostatin, and mouse plasma samples diluted 25-fold or more spiking plasma concentrations of 200 μg/ml of mice latent myostatin were prepared. Then the samples were added into CDs and flowed over the bead column. Subsequently, Alexa-labeled Goat anti-human IgG polyclonal antibody (BETHYL) was added into CDs and flowed over the bead column. The concentration in mouse plasma was calculated from the response of the calibration curve using the Gyrolab Evaluator Program. The time course of antibody concentration in plasma after intravenous administration of anti-latent myostatin antibody and latent myostatin measured by this method is shown in FIG. 28B.

### Effect of pI on Myostatin Concentration In Vivo

[0707] After administration of MS1032LO06-SG1, plasma total myostatin concentration at 7 hours decreased 12 fold compared to plasma total myostatin concentration at 5 minutes in the experiment PK-2. In contrast, after administration of MS1032LO06-P1375m, MS1032LO06-P1378m and MS1032LO06-P1383m, plasma total myostatin concentration at 7 hours decreased 26-67 fold compared to plasma total myostatin concentration at 5 minutes in the experiment PK-2. Antibody concentration of MS1032LO06-P1378m and MS1032LO06-P1383m decreased more than 3 fold compared to that of MS1032LO06-SG1, although the difference in MS1032LO06-P1375m's concentration at each sampling point compared to MS1032LO06-SG1's was within 2 fold in the experiment PK-2. pI variants including the amino acid substitutions on Q311R/D413K showed enhancement of myostatin elimination from plasma without enhancement of antibody elimination from plasma.

[0708] Furthermore, total myostatin concentration and antibody concentration after administration of MS1032LO06-P1499m were evaluated under co-administration of human normal immunoglobulin to mimic human plasma. After administration of MS1032LO06-P1375m and MS1032LO06-P1499m, plasma total myostatin concentration at 7 hours decreased 3.4 and 5.3 fold compared to plasma total myostatin concentration at 5 minutes, and total myostatin concentration and antibody concentration at each sampling point in MS1032LO06-P1499m was within 1.5 fold compared to that in MS1032LO06-P1375m in the experiment PK-4. pI variants including the amino acid substitutions on Q311R/P343R also showed enhancement of myostatin elimination from plasma without enhancement of antibody elimination from plasma.

[0709] High pI variants have more positive charge in plasma. Since this positive charge interacts with cell surface of negative charge, antigen-antibody immune complex of high pI variants get closer to cell surface, resulted in increased cellular uptake of antigen-antibody immune complex of high pI variants.

### Example 31

### PI-Increased Substitutions in Combination with FcγRIIb-Enhanced Fc Variant

[0710] The effect of clearance of myostatin by FcγRIIb-enhanced Fc variant in combination with other pI-increasing substitutions were evaluated in human FcγRIIb transgenic mice. Human FcγRIIb transgenic mice were generated by microinjection of BAC (bacterial artificial chromosome) vector containing all the exons of human FCGR2B gene into the pronucleus of fertilized eggs of C57BL/6N by standard techniques (see, e.g., J. Immunol., 2015 Oct. 1; 195(7): 3198-205). Mouse FcγRIIb deficient mice were generated using zinc finger nucleases (ZFNs) which was designed to target exon 1. The Humanized FcγRIIb mice were established by crossing human FcγRIIb transgenic mice with mouse FcγRIIb KO mice. Using this mouse, the combination effect of affinity enhancement to human FcγRIIb and pI increase on clearance of soluble antigen can be evaluated.

TABLE 27

| | | | | | | | | | KD (M) for | |
|---|---|---|---|---|---|---|---|---|---|---|
| Heavy chain | | SEQ ID | | KD (M) for cynoFcgRs | | | | | humanFcgRs | |
| name | CH | NO. | Substitution | FcgRIIa1 | FcgRIIa2 | FcgRIIa3 | FcgRIIb | FcgRIIIaS | FcgRIIaH | FcgRIIaR |
| M103205H795- | SG1 | 9 | — | 4.8E−06 | 4.7E−06 | 8.6E−06 | 1.9E−0.6 | 2.6E−07 | 1.9E−07 | 1.0E−05 |
| SG1 | | | | | | | | | | |
| M103205H795- | MY201 | 231 | G236N/H238D/A330K | 1.5E−06 | 1.2E−06 | 1.8E−06 | 3.3E−07 | 3.7E−06 | 9.8E−07 | 1.2E−06 |
| MY201 | | | | | | | | | | |
| M103205H795- | MY351 | 232 | G236N/H268D/Q311R/ | 1.6E−06 | 1.3E−06 | 2.2E−06 | 3.8E−07 | 4.1E−06 | 1.2E−08 | 1.6E−06 |
| MY351 | | | A330K/D413K | | | | | | | |
| M103205H795- | MY352 | 248 | G235N/H268D/Q911R/ | 1.7E−06 | 1.3E−06 | 2.2E−06 | 4.2E−07 | 4.0E−06 | 1.2E−06 | 1.6E−06 |
| MY352 | | | A330K/D413R | | | | | | | |
| M103205H795- | PK55 | 249 | G235N/H268D/Q111R/ | 1.4E−06 | 1.2E−06 | 2.0E−06 | 3.6E−07 | 3.3E−06 | 8.3E−07 | 1.5E−06 |
| MY55 | | | A330K/P341R | | | | | | | |
| M103205H795- | PK56 | 250 | G236N/H268D/Q311R/ | 1.8E−06 | 1.5E−06 | 3.5E−06 | 5.5E−07 | 4.4E−06 | 1.2E−06 | 1.9E−06 |
| MY56 | | | A330K/P383R/D413R | | | | | | | |
| M103205H795- | PK57 | 251 | G236N/H268D/Q311R/ | 1.9E−06 | 1.7E−06 | 3.1E−06 | 5.2E−07 | 4.3E−06 | 1.3E−06 | 2.2E−05 |
| MY57 | | | A330K/N384R/D413R | | | | | | | |

| | KD (M) for | | | | | | | | | | |
|---|---|---|---|---|---|---|---|---|---|---|---|
| | humanFcgRs | | KD fold for cynoFcgRs (SG1 = 1) | | | | | KD fold for humanFcgRs (SG1 = 1) | | | |
| Heavy chain name | FcgRIIb | FcgRIIIaV | FcgRIIa1 | FcgRIIa2 | FcgRIIa3 | FcgRIIb | FcgRIIIaS | FcgRIIaH | FcgRIIaR | FcgRIIb | FcgRIIIaV |
| M103205H795-SG1 | 4.7E−06 | 6.2E−07 | 1.0 | 1.0 | 1.0 | 1.0 | 1.00 | 1.0 | 1.0 | 1.0 | 1.00 |
| M103205H795- | 8.5E−07 | 3.7E−05 | 3.2 | 4.0 | 4.5 | 5.0 | 0.08 | 0.9 | 0.6 | 5.6 | 0.02 |
| MY201 | | | | | | | | | | | |
| M103205H795- | 9.7E−07 | 7.4E−06 | 3.0 | 3.8 | 4.0 | 5.0 | 0.07 | 0.7 | 0.8 | 4.7 | 0.03 |
| MY351 | | | | | | | | | | | |
| M103205H795- | 1.0E−06 | 1.1E−05 | 2.7 | 3.3 | 3.9 | 4.7 | 0.07 | 0.7 | 0.6 | 4.6 | 0.04 |
| MY352 | | | | | | | | | | | |
| M103205H795-MY55 | 7.6E−07 | 1.3E−05 | 3.5 | 4.1 | 4.3 | 5.4 | 0.08 | 1.1 | 0.7 | 6.3 | 0.05 |
| M103205H795-MY56 | 1.0E−06 | 1.0E−05 | 2.5 | 3.9 | 2.5 | 3.9 | 0.08 | 0.8 | 0.5 | 4.7 | 0.06 |
| M103205H795-MY57 | 1.2E−06 | 2.3E−05 | 2.3 | 2.0 | 2.7 | 3.8 | 0.06 | 0.7 | 0.5 | 4.1 | 0.07 |

### Preparation and Profile of Tested Variants

[0711] The tested 7 antibodies and their binding profiles are summarized in Table 27. The heavy chain, MS103205H795-MY352, MS103205H795-PK55, MS103205H795-PK56, MS103205H795-PK57, were prepared by introducing pI-increasing substitutions Q311R/D413R, Q311R/P343R, Q311R/P343R/D413R, Q311R/N384R/D413R, respectively, into MS103205H795-MY201. All the MS1032LO06 variants were expressed with M103202L889-SK1 as light chain according to the method shown in Example 34 and their affinities to human and cynoFcγRs were evaluated using the method in Example 27.

[0712] Based on the SPR analysis summarized in Table 27, it was confirmed that the pI-increasing substitutions do not affect the FcγR binding of FcγRIIb-enhanced Fc variants. MY201 and MY351, which was prepared by introducing Q311R/D413K into MY201, show 6-fold and 5-fold enhanced human FcγRIIb binding, respectively. With respect to other human and cynoFcγRs, they show almost the same binding profile. Similarly, MY352, PK55, PK56 and PK57 showed similar binding profile with parent MY201 (Table 27). These results indicates that either pair of pI-increasing substitutions does not affect the affinities against human and cynoFcγRs.

### PK Study in Human FcγRIIb Transgenic Mice

### In Vivo Test Using Human FcγRIIb Transgenic Mice

[0713] The elimination of myostatin and anti-latent myostatin antibody were assessed in vivo upon co-administration of anti-latent myostatin antibody and human latent myostatin in human FcγRIIb transgenic mice in which mouse FcγRII was substituted with human FcγRIIb. An anti-latent myostatin antibody (0.3 mg/ml) and latent myostatin (0.05 mg/ml) were administered at a single dose of 10 ml/kg into the caudal vein. Blood was collected at 5 minutes, 1 hour, 4 hours, 7 hours, 1 day, 7 days, 14 days, 21 days, and 28 days after administration. The collected blood was centrifuged immediately at 15,000 rpm in 4° C. for 5 minutes to separate the plasma. The separated plasma was stored at or below −20° C. until measurement. The anti-latent myostatin antibodies used were MS1032LO06-SG1, MS1032LO06-MY201, MS1032LO06-MY351, MS1032LO06-MY352, MS1032LO06-PK55, MS1032LO06-PK56 and MS1032LO06-PK57.

### Measurement of Total Myostatin Concentration in Plasma by Electrochemiluminescence

[0714] The concentration of total myostatin in mouse plasma was measured by electrochemiluminescence (ECL) as described in Example 28. The time course of total myostatin concentration in plasma after intravenous administration of anti-latent myostatin antibody and latent myostatin measured by this method is shown in FIG. 29.

### Measurement of Anti-Latent Myostatin Antibody Concentration in Plasma by Enzyme-Linked Immunosorbent Assay (ELISA)

[0715] The concentration of anti-latent myostatin antibody in mouse plasma was measured by ELISA. Anti-human IgG (γ-chain specific) F(ab′)2 antibody fragment (Sigma) was dispensed onto a Nunc-ImmunoPlate MaxiSorp (Nalge Nunc International) and allowed to stand overnight at 4° C. to prepare anti-human IgG-immobilized plates. Calibration curve samples having plasma concentrations of 2.5, 1.25, 0.625, 0.313, 0.156, 0.078, and 0.039 μg/ml, and mouse plasma samples diluted 100-fold or more were prepared. Then, the samples were dispensed onto the anti-human IgG-immobilized plates, and allowed to stand for 1 hour at room temperature. Subsequently, Goat Anti-Human IgG (γ-chain specific) Biotin conjugate (Southern Biotech) was added to react for 1 hour at room temperature. Then, Streptavidin-PolyHRP80 (Stereospecific Detection Technologies) was added to react for one hour at room temperature, and chromogenic reaction was carried out using TMB One Component HRP Microwell Substrate (BioFX Laboratories) as a substrate. After stopping the reaction with 1 N sulfuric acid (Showa Chemical), the absorbance at 450 nm was measured by a microplate reader. The concentration in mouse plasma was calculated from the absorbance of the calibration curve using the analytical software SOFTmax PRO (Molecular Devices). The time course of antibody concentration in plasma after intravenous administration of anti-latent myostatin antibody and latent myostatin measured by this method is shown in FIG. 30.

### Effect of pI and FcγR Binding on Myostatin Concentration In Vivo

[0716] After administration of MS1032LO06-MY201, plasma total myostatin concentration at 7 hours decreased 8 fold compared to plasma total myostatin concentration at 5 minutes. In contrast, after administration of MS1032LO06-PK57, plasma total myostatin concentration at 7 hours decreased 376 fold compared to plasma total myostatin concentration at 5 minutes. Other high pI variants showed similar enhancement of myostatin elimination from plasma. Antibody concentration of high pI variants at 28 days decreased 2-3 fold compared to antibody concentration of MS1032LO06-SG1, and pI variants showed slight enhancement of antibody elimination from plasma.

[0717] High pI variants have more positive charge in plasma. Since this positive charge interacts with cell surface of negative charge, antigen-antibody immune complex of high pI variants get closer to cell surface, resulted in increased cellular uptake of antigen-antibody immune complex of high pI variants.

### Example 32

### Development of Human FcγRIIb-Enhanced Fc Variants

[0718] Human FcγRIIb-enhanced Fc variants with anti-myostatin variable region were constructed and their affinity for human FcγRs was evaluated. Specifically, human FcγRIIb-enhanced Fc variants were constructed by introducing substitutions into MS103240H795-SG1 (VH, SEQ ID NO: 92; CH, SEQ ID NO: 9) in combination with T250V/T307P substitutions. In addition, substitutions (Q311R/D413K or Q311R/P343R) were also introduced. The variants were expressed using M103202L1045-SK1 as light chain and their affinity to human FcγRs was analyzed according to the method shown in Example 34. Table 28 shows the result of kinetic analysis against human and cynoFcγRs. The KD values in cells filled in gray were calculated using [Equation 2]since their affinity was too weak to be correctly determined by kinetic analysis.

[0719] All the variants evaluated showed enhanced affinity to human FcγRIIb and reduced binding to human FcγRIIaR, FcγRIIaH, FcγRIIIaV compared to SG1. The affinity to human FcγRIIb varies between 4.1-fold and 30.5-fold increase compared to SG1. The affinity to human FcγRIIaR was between 0.02-fold and 0.22-fold. The affinities to human FcγRIIaH and human FcγRIIIaV were less than 0.04-fold and 0.012-fold, respectively. It was revealed that the substitutions (T250V/T307P) does not affect the binding profile to human FcγRs by comparing the affinities of MY009 (P238D) and MY214 (P238D/T250V/T307P). On the other hand, both pair of pI-increasing substitutions (Q311R/D413K and Q311R/P343R) decreased the binding affinity about 0.5-fold compared to the variants which does not contain the pI-increasing substitutions. For example, although TT14 showed 30.5-fold higher affinity to human FcγRIIb, it showed only 16.1-fold and 14.5-fold increase in combination with Q311R/D413K (TT33) and Q311R/P343R (TT32), respectively.

[0720] Furthermore, the substitutions used in Example 29 for improving antibody half-life and reducing binding to rheumatoid factor were introduced into human FcγRIIb-enhanced Fc variants and their affinity against human FcγRs were analyzed (Table 29). In this SPR analysis, all the data were obtained using mouse anti-human IgG kappa light chain for capturing the antibodies of interest. Table 30 shows the result and the KD values in cells filled in gray were calculated using [Equation 2] since their affinity was too weak to be correctly determined by kinetic analysis.

[0721] SG1 and TT33 were evaluated again in this measurement in which capturing method was different from that in Table 28. As a result, “KD fold” values of TT33 were consistent with those obtained with Table 28 (16.1-fold in Table 28 and 15.7-fold in Table 30 against human FcγRIIb). TT92 and TT93, which were constructed by introducing N434A/Q438R/S440E and M428L/N434A/Y436T/Q438R/S440E into TT33, showed comparable binding profile to TT33. Similarly, TT90 and TT91 derived from TT32, TT72 and TT73 derived from TT31, TT70 and TT71 derived from TT30, TT68 and TT69 derived from TT21, and TT66 and TT67 derived from TT20 show comparable binding profile to those of parental antibodies shown in Table 28. These results indicate that substitutions for improving antibody half-life and reducing binding to rheumatoid factor do not affect binding profile of human FcγRIIb-enhanced variants against human FcγRs.

### Example 33

### Cell Imaging Analysis of FcγRIIb-Enhanced Fc Variants

[0722] To evaluate the intracellular uptake of antigen-antibody complex formed by the antibody described in Example 32, cell imaging assay described in Example 30 was performed. To avoid the signal saturation, the antigen-antibody complexes were formed in a culture solution with the antibody concentration being 1.25 mg/mL and the antigen concentration being 0.34 mg/mL in this example.

[0723] Assay results are shown in FIG. 31. By increasing the binding affinity to human FcγRIIb, cellular uptake of antigen-antibody complex were increased. In case of TT14, which has 30 fold enhanced binding affinity to human FcγRIIb compared with SG1, the antigen florescent intensity inside cells was 7.5 fold increased as that of SG1.

[0724] Although pI-increasing substitutions (Q311R/D413K and Q311R/P343R) decreased the binding affinity to human FcγRIIb about 0.5-fold compared to the variants

TABLE 28
Binding profile of the human FcγRIIb-enhanced Fc variant

| Heavy chain name | CH | SEQ ID NO | Substitutions |
|---|---|---|---|
| MS103240H795-SG1 | SG1 | 9 | — |
| MS103240H795-MY009 | MY009 | 252 | P238D |
| MS103240H795-MY214 | MY214 | 253 | P238D/T250V/T307P |
| MS103240H795-TT08 | TT08 | 254 | P238D/T250V/T307P/A330K |
| MS103240H795-TT09 | TT09 | 255 | P238D/T250V/V264I/T307P/A330K |
| MS103240H795-TT10 | TT10 | 256 | P238D/T250V/S267A/T307P/A330K |
| MS103240H795-TT11 | TT11 | 257 | L234Y/P238D/T250V/T307P/A330K |
| MS103240H795-TT12 | TT12 | 258 | L234Y/P238D/T250V/S267A/T307P/A330K |
| MS103240H795-TT13 | TT13 | 259 | P238D/T250V/V264I/S267A/T307P/A330K |
| MS103240H795-TT14 | TT14 | 260 | L234Y/P238D/T250V/V264I/T307P/A330K |
| MS103240H795-TT15 | TT15 | 261 | L234Y/P238D/T250V/V264I/S267A/T307P/A330K |
| MS103240H795-TT20 | TT20 | 262 | P238D/T250V/T307P/Q311R/A330K/P343R |
| MS103240H795-TT21 | TT21 | 263 | P238D/T250V/T307P/Q311R/A330K/D413K |
| MS103240H795-TT22 | TT22 | 264 | P238D/T250V/V264I/T307P/Q311R/A330K/P343R |
| MS103240H795-TT23 | TT23 | 265 | P238D/T250V/V264I/T307P/Q311R/A330K/D413K |
| MS103240H795-TT24 | TT24 | 266 | P238D/T250V/S267A/T307P/Q311R/A330K/P343R |
| MS103240H795-TT25 | TT25 | 267 | P238D/T250V/S267A/T307P/Q311R/A330K/D413K |
| MS103240H795-TT26 | TT26 | 268 | L234Y/P238D/T250V/T307P/Q311R/A330K/P343R |
| MS103240H795-TT27 | TT27 | 269 | L234Y/P238D/T250V/T307P/Q311R/A330K/D413K |
| MS103240H795-TT28 | TT28 | 270 | L234Y/P238D/T250V/S267A/T307P/Q311R/A330K/P343R |
| MS103240H795-TT29 | TT29 | 271 | L234Y/P238D/T250V/S267A/T307P/Q311R/A330K/D413K |
| MS103240H795-TT30 | TT30 | 272 | P238D/T250V/V264I/S267A/T307P/Q311R/A330K/P343R |
| MS103240H795-TT31 | TT31 | 273 | P238D/T250V/V264I/S267A/T307P/Q311R/A330K/D413K |
| MS103240H795-TT32 | TT32 | 274 | L234Y/P238D/T250V/V264I/T307P/Q311R/A330K/P343R |
| MS103240H795-TT33 | TT33 | 275 | L234Y/P238D/T250V/V264I/T307P/Q311R/A330K/D413K |
| MS103240H795-TT34 | TT34 | 276 | L234Y/P238D/T250V/V264I/S267A/T307P/Q311R/A330K/P343R |
| MS103240H795-TT35 | TT35 | 277 | L234Y/P238D/T250V/V264I/S267A/T307P/Q311R/A330K/D413K |

| | KD (M) for humanFcgRs | | | | KD fold for humanFcgRs (SG1 = 1) | | | |
|---|---|---|---|---|---|---|---|---|
| Heavy chain name | FcgRIIaH | FcgRIIaR | FcgRIIb | FcgRIIIaV | FcgRIIaH | FcgRIIaR | FcgRIIb | FcgRIIIaV |
| MS103240H795-SG1 | 7.5E−07 | 1.1E−06 | 5.8E−06 | 8.1E−07 | 1.000 | 1.00 | 1.0 | 1.000 |
| MS103240H795-MY009 | 7.3E−05 | 2.3E−05 | 1.3E−06 | 2.2E−04 | 0.010 | 0.05 | 4.5 | 0.004 |
| MS103240H795-MY214 | 3.2E−05 | 2.1E−05 | 1.0E−06 | 1.5E−04 | 0.023 | 0.05 | 5.8 | 0.005 |
| MS103240H795-TT08 | 5.5E−05 | 1.6E−05 | 6.8E−07 | 9.6E−05 | 0.014 | 0.07 | 8.5 | 0.008 |
| MS103240H795-TT09 | 4.4E−05 | 1.4E−05 | 2.9E−07 | 1.7E−04 | 0.017 | 0.08 | 20.0 | 0.005 |
| MS103240H795-TT10 | 5.6E−05 | 8.7E−06 | 6.3E−07 | 7.9E−04 | 0.013 | 0.13 | 9.2 | 0.001 |
| MS103240H795-TT11 | 2.4E−05 | 1.0E−05 | 5.2E−07 | 1.7E−04 | 0.031 | 0.11 | 11.2 | 0.005 |
| MS103240H795-TT12 | 2.0E−05 | 5.0E−06 | 4.9E−07 | 1.3E−04 | 0.038 | 0.22 | 11.8 | 0.006 |
| MS103240H795-TT13 | 4.5E−05 | 9.8E−06 | 3.2E−07 | 1.4E−04 | 0.017 | 0.11 | 18.1 | 0.006 |
| MS103240H795-TT14 | 1.8E−05 | 7.6E−06 | 1.9E−07 | 1.5E−04 | 0.042 | 0.14 | 30.5 | 0.005 |
| MS103240H795-TT15 | 2.9E−05 | 6.1E−06 | 2.5E−07 | 1.3E−04 | 0.026 | 0.18 | 23.2 | 0.006 |
| MS103240H795-TT20 | 9.1E−05 | 2.8E−05 | 1.4E−06 | 8.4E−05 | 0.008 | 0.04 | 4.1 | 0.010 |
| MS103240H795-TT21 | 5.6E−05 | 2.0E−05 | 1.3E−06 | 8.5E−05 | 0.013 | 0.06 | 4.5 | 0.010 |
| MS103240H795-TT22 | 6.0E−05 | 2.1E−05 | 5.9E−07 | 7.2E−05 | 0.013 | 0.05 | 9.8 | 0.011 |
| MS103240H795-TT23 | 1.0E−04 | 4.8E−05 | 5.5E−07 | 4.5E−04 | 0.007 | 0.02 | 10.5 | 0.002 |
| MS103240H795-TT24 | 4.9E−05 | 1.3E−05 | 1.2E−06 | 2.6E−04 | 0.015 | 0.08 | 4.8 | 0.003 |
| MS103240H795-TT25 | 2.2E−05 | 1.3E−05 | 1.0E−06 | 1.4E−04 | 0.034 | 0.08 | 5.8 | 0.006 |
| MS103240H795-TT26 | 6.9E−05 | 2.1E−05 | 1.1E−06 | 2.0E−04 | 0.011 | 0.05 | 5.3 | 0.004 |
| MS103240H795-TT27 | 5.2E−05 | 1.4E−05 | 8.2E−07 | 1.3E−04 | 0.014 | 0.08 | 7.1 | 0.006 |
| MS103240H795-TT28 | 4.8E−05 | 7.7E−06 | 8.5E−07 | 8.2E−05 | 0.016 | 0.14 | 6.8 | 0.010 |
| MS103240H795-TT29 | 3.7E−05 | 7.5E−06 | 8.1E−07 | 8.9E−05 | 0.020 | 0.15 | 7.2 | 0.009 |
| MS103240H795-TT30 | 1.5E−04 | 1.4E−05 | 5.7E−07 | 6.6E−05 | 0.005 | 0.08 | 10.2 | 0.012 |
| MS103240H795-TT31 | 1.1E−04 | 1.9E−05 | 5.6E−07 | 2.9E−04 | 0.007 | 0.06 | 10.4 | 0.003 |
| MS103240H795-TT32 | 5.0E−05 | 1.2E−05 | 4.0E−07 | 1.1E−04 | 0.015 | 0.09 | 14.5 | 0.007 |
| MS103240H795-TT33 | 4.2E−05 | 1.2E−05 | 3.6E−07 | 4.4E−04 | 0.018 | 0.09 | 16.1 | 0.002 |
| MS103240H795-TT34 | 2.2E−05 | 8.9E−06 | 4.9E−07 | 9.6E−05 | 0.034 | 0.12 | 11.8 | 0.008 |
| MS103240H795-TT35 | 2.5E−05 | 9.0E−06 | 4.3E−07 | 1.8E−04 | 0.030 | 0.12 | 13.5 | 0.004 |

TABLE 29
Amino acid sequences of heavy chain constant regions comprising
human FcγRIIb-enhanced Fc variants (shown as SEQ ID NOs)

| | | | | +M428L | |
|---|---|---|---|---|---|
| | | | +N434A | +N434A | +M428L |
| | | +N434A | +Y436T | +Y436T | +N434A |
| | | +Q438R | +Q438R | +Q438R | +Q438R |
| CH | — | +S440E | +S440E | +S440E | +S440E |
| MY009 | 252 | 278 | 304 | 330 | 356 |
| MY214 | 253 | 279 | 305 | 331 | 357 |
| TT08 | 254 | 280 | 306 | 332 | 358 |
| TT09 | 255 | 281 | 307 | 333 | 359 |
| TT10 | 256 | 282 | 308 | 334 | 360 |
| TT11 | 257 | 283 | 309 | 335 | 361 |
| TT12 | 258 | 284 | 310 | 336 | 362 |
| TT13 | 259 | 285 | 311 | 337 | 363 |
| TT14 | 260 | 286 | 312 | 338 | 364 |
| TT15 | 261 | 287 | 313 | 339 | 365 |
| TT20 | 262 | 288 | 314 | 340 | 366 |
| TT21 | 263 | 289 | 315 | 341 | 367 |
| TT22 | 264 | 290 | 316 | 342 | 368 |
| TT23 | 265 | 291 | 317 | 343 | 369 |
| TT24 | 266 | 292 | 318 | 344 | 370 |
| TT25 | 267 | 293 | 319 | 345 | 371 |
| TT26 | 268 | 294 | 320 | 346 | 372 |
| TT27 | 269 | 295 | 321 | 347 | 373 |
| TT28 | 270 | 296 | 322 | 348 | 374 |
| TT29 | 271 | 297 | 323 | 349 | 375 |
| TT30 | 272 | 298 | 324 | 350 | 376 |
| TT31 | 273 | 299 | 325 | 351 | 377 |
| TT32 | 274 | 300 | 326 | 352 | 378 |
| TT33 | 275 | 301 | 327 | 353 | 379 |
| TT34 | 276 | 302 | 328 | 354 | 380 |
| TT35 | 277 | 303 | 329 | 355 | 381 |

TABLE 30
Binding profile of the human FcγRIIb-enhanced Fc variants

| | | SEQ ID | |
|---|---|---|---|
| Heavy chain name | CH | NO | Substitutions |
| MS103240H795-SG1 | SG1 | 9 | — |
| MS103240H795-TT33 | TT33 | 275 | L234Y/P238D/T250V/V264I/T307P/Q311R/A330K/D413K |
| MS103240H795-TT66 | TT66 | 288 | P238D/T250V/T307P/Q311R/A330K/P343R/N434A/Q436R/S440E |
| MS103240H795-TT67 | TT67 | 340 | P238D/T250V/T307P/Q311R/A330K/P343R/M428L/N434A/Y436T/Q438R/S440E |
| MS103240H795-TT68 | TT68 | 289 | P238D/T250V/T307P/Q311R/A330K/D413K/N434A/Q438R/S440E |
| MS103240H795-TT69 | TT69 | 341 | P238D/T250V/T307P/Q311R/A330K/M428L/N434A/Y436T/Q438R/S440E |
| MS103240H795-TT70 | TT70 | 290 | P238D/T250V/V264I/T307P/Q311R/A330K/P343R/N434A/Q438R/S440E |
| MS103240H795-TT71 | TT71 | 342 | P238D/T250V/V264I/T307P/Q311R/A330K/P343R/M428L/N434A/Y436T/Q438R/S440E |
| MS103240H795-TT72 | TT72 | 291 | P238D/T250V/V264I/T307P/Q311R/A330K/D413K/N434A/Q438R/S440E |
| MS103240H795-TT73 | TT73 | 343 | P238D/T250V/V264I/T307P/Q311R/A330K/D413K/M428L/N434A/Y436T/Q438R/S440E |
| MS103240H795-TT90 | TT90 | 300 | L234Y/P238D/T250V/V264I/T307P/Q311R/A330K/P343R/N434A/Q438R/S440E |
| MS103240H795-TT91 | TT91 | 352 | L234Y/P238D/T250V/V264I/T307P/Q311R/A330K/P343R/M428L/N434A/Y436T/Q438R/S440E |
| MS103240H795-TT92 | TT92 | 301 | L234Y/P238D/T250V/V264I/T307P/Q311R/A330K/D413K/N434A/Q438R/S440E |
| MS103240H795-TT93 | TT93 | 353 | L234Y/P238D/T250V/V264I/T307P/Q311R/A330K/D413K/M428L/N434A/Y436T/Q438R/S440E |

| | KD (M) for humanFcgRs | | | | KD fold for humanFcgRs (SG1 = 1) | | | |
|---|---|---|---|---|---|---|---|---|
| Heavy chain name | FcgRIIaH | FcgRIIaR | FcgRIIb | FcgRIIIaV | FcgRIIaH | FcgRIIaR | FcgRIIb | FcgRIIIaV |
| MS103240H795-SG1 | 9.7E−07 | 1.2E−06 | 4.7E−06 | 7.2E−07 | 1.000 | 1.00 | 1.0 | 1.000 |
| MS103240H795-TT33 | 3.5E−05 | 2.3E−05 | 3.0E−07 | 4.0E−04 | 0.028 | 0.05 | 15.7 | 0.002 |
| MS103240H795-TT66 | 1.3E−04 | 3.2E−05 | 1.0E−06 | 5.9E−04 | 0.007 | 0.04 | 4.7 | 0.001 |
| MS103240H795-TT67 | 1.2E−04 | 2.8E−05 | 1.2E−06 | 6.1E−04 | 0.008 | 0.04 | 3.9 | 0.001 |
| MS103240H795-TT68 | 2.1E−04 | 6.1E−05 | 9.6E−07 | 4.8E−04 | 0.006 | 0.02 | 4.9 | 0.001 |
| MS103240H795-TT69 | 1.3E−04 | 3.4E−05 | 1.1E−06 | 9.3E−04 | 0.008 | 0.04 | 4.3 | 0.001 |
| MS103240H795-TT70 | 7.2E−05 | 4.0E−05 | 3.7E−07 | 3.9E−04 | 0.013 | 0.03 | 12.7 | 0.002 |
| MS103240H795-TT71 | 9.6E−05 | 2.7E−05 | 4.2E−07 | 4.0E−04 | 0.010 | 0.04 | 11.2 | 0.002 |
| MS103240H795-TT72 | 7.9E−05 | 2.4E−05 | 4.0E−07 | 9.0E−04 | 0.012 | 0.05 | 11.8 | 0.001 |
| MS103240H795-TT73 | 7.4E−05 | 1.9E−05 | 4.2E−07 | 5.6E−04 | 0.013 | 0.06 | 11.2 | 0.001 |
| MS103240H795-TT90 | 2.9E−05 | 2.5E−05 | 3.0E−07 | 9.6E−04 | 0.033 | 0.05 | 15.7 | 0.002 |
| MS103240H795-TT91 | 4.6E−05 | 3.0E−05 | 3.2E−07 | 4.5E−04 | 0.020 | 0.04 | 14.7 | 0.002 |
| MS103240H795-TT92 | 4.0E−05 | 2.0E−05 | 2.8E−07 | 4.9E−04 | 0.024 | 0.06 | 16.8 | 0.001 |
| MS103240H795-TT93 | 5.2E−05 | 2.4E−05 | 3.1E−07 | 4.7E−04 | 0.019 | 0.05 | 15.2 | 0.002 |

which do not contain the pI-increasing substitutions, the cellular uptake of antigen antibody complex of Fc variants with pI increased substitutions was increased compared to Fc variants without pI increased substitutions. TT33 shows 36 fold increase in antigen antibody uptake into the cells compared to SG1, while its parent TT14 shows 7.5 fold increase in cellular uptake. Furthermore, TT33 shows comparable cellular uptake of antigen-antibody complex into the cells compared to SG1071, SG1074, SG1077, SG1079, SG1080 and SG1081 which shows strong sweeping in Cynomolugus monkey. These results suggest that combining of pI increased substitutions with FcγRIIb enhanced Fc variants is the powerful tool for antigen sweeping.

### Example 34

### Construction of Antibody Expression Vectors; and Expression and Purification of Antibodies

[0725] Synthesis of full-length genes encoding the nucleotide sequences of the H chain and L chain of the antibody variable regions was carried out by production methods known to those skilled in the art using Assemble PCR and such. Introduction of amino acid substitutions was carried out by methods known to those skilled in the art using PCR or such. The obtained plasmid fragment was inserted into an animal cell expression vector, and the H-chain expression vector and L-chain expression vector were produced. The nucleotide sequence of the obtained expression vector was determined by methods known to those skilled in the art. The produced plasmids were introduced transiently into the HEK293H cell line derived from human embryonic kidney cancer cells (Invitrogen) or into FreeStyle293 cells (Invitrogen) for antibody expression. The obtained culture supernatant was collected, and then passed through a 0.22 μm MILLEX(R)-GV filter (Millipore), or through a 0.45 μm MILLEX(R)-GV filter (Millipore) to obtain the culture supernatant. Antibodies were purified from the obtained culture supernatant by methods known to those skilled in the art using rProtein A Sepharose Fast Flow (GE Healthcare) or Protein G Sepharose 4 Fast Flow (GE Healthcare). For the concentration of the purified antibodies, their absorbance at 280 nm was measured using a spectrophotometer. From the obtained value, the extinction coefficient calculated by the methods such as PACE was used to calculate the antibody concentration (Protein Sci. 4:2411-2423 (1995)).

[0726] Although the foregoing invention has been described in some detail by way of illustration and example for purposes of clarity of understanding, the descriptions and examples should not be construed as limiting the scope of the invention. The disclosures of all patent and scientific literature cited herein are expressly incorporated in their entirety by reference.

What is claimed is:

1. An isolated antibody that binds to latent myostatin, wherein the antibody inhibits activation of myostatin.

2. The antibody of claim 1, wherein the antibody:
(a) blocks the release of mature myostatin from latent myostatin;
(b) blocks the proteolytic release of mature myostatin;
(c) blocks the spontaneous release of mature myostatin;
(d) does not bind to mature myostatin; or
(e) binds to an epitope within a fragment consisting of amino acids 21-100 of myostatin propeptide (SEQ ID NO: 78).

3. The antibody of claim 1, wherein the antibody competes for binding latent myostatin with, or binds the same epitope as, an antibody comprising a VH and VL pair described in Table 2a, 11a, or 13.

4. The antibody of claim 1 which binds to latent myostatin with higher affinity at neutral pH than at acidic pH, or which binds to latent myostatin with higher affinity at pH7.4 than at pH5.8.

5. The antibody of claim 1 which is (a) a monoclonal antibody; (b) a human, humanized, or chimeric antibody; (c) a full length IgG antibody; or (d) an antibody fragment that binds to myostatin.

6. The antibody of claim 1, wherein the antibody comprises:
(a) (i) a HVR-H3 comprising the amino acid sequence GVPAX₁SX₂GGDX₃, wherein X₁ is Y or H, X₂ is T or H, X₃ is L or K (SEQ ID NO: 128), (ii) a HVR-L3 comprising the amino acid sequence AGGYGGGX₁YA, wherein X₁ is L or R (SEQ ID NO: 131), and (iii) a HVR-H2 comprising the amino acid sequence IISX₁AGX₂X₃YX₄X₅X₆WAKX₇, wherein X₁ is Y or H, X₂ is S or K, X₃ is T, M or K, X₄ is Y or K, X₅ is A, M or E, X₆ is S or E, X₇ is G or K (SEQ ID NO: 127);
(b) (i) a HVR-H1 comprising the amino acid sequence X₁X₂DIS, wherein X₁ is S or H, X₂ is Y, T, D or E (SEQ ID NO: 126), (ii) a HVR-H2 comprising the amino acid sequence IISX₁AGX₂X₃YX₄X₅X₆WAKX_{T}, wherein X₁ is Y or H, X₂ is S or K, X₃ is T, M or K, X₄ is Y or K, X₅ is A, M or E, X₆ is S or E, X₇ is G or K (SEQ ID NO: 127), and (iii) a HVR-H3 comprising the amino acid sequence GVPAX₁SX₂GGDX₃, wherein X₁ is Y or H, X₂ is T or H, X₃ is L or K (SEQ ID NO: 128);
(c) (i) a HVR-H1 comprising the amino acid sequence X₁X₂DIS, wherein X₁ is S or H, X₂ is Y, T, D or E (SEQ ID NO: 126), (ii) a HVR-H2 comprising the amino acid sequence IISX₁AGX₂X₃YX₄X₅X₆WAKX₇, wherein X₁ is Y or H, X₂ is S or K, X₃ is T, M or K, X₄ is Y or K, X₅ is A, M or E, X₆ is S or E, X₇ is G or K (SEQ ID NO: 127), (iii) a HVR-H3 comprising the amino acid sequence GVPAX₁SX₂GGDX₃, wherein X₁ is Y or H, X₂ is T or H, X₃ is L or K (SEQ ID NO: 128), (iv) a HVR-L1 comprising the amino acid sequence X₁X₂SQX₃VX₄X₅X₆NWLS, wherein X₁ is Q or T, X₂ is S or T, X₃ is S or E, X₄ is Y or F, X₅ is D or H, X₅ is N, D, A or E (SEQ ID NO: 129); (v) a HVR-L2 comprising the amino acid sequence WAX₁TLAX₂, wherein X₁ is S or E, X₂ is S, Y, F or W (SEQ ID NO: 130); and (vi) a HVR-L3 comprising the amino acid sequence AGGYGGGX₁YA, wherein X₁ is L or R (SEQ ID NO: 131); or
(d) (i) a HVR-L1 comprising the amino acid sequence X₁X₂SQX₃VX₄X₅X₆NWLS, wherein X₁ is Q or T, X₂ is S or T, X₃ is S or E, X₄ is Y or F, X₅ is D or H, X₆ is N, D, A or E (SEQ ID NO: 129); (ii) a HVR-L2 comprising the amino acid sequence WAX₁TLAX₂, wherein X₁ is S or E, X₂ is S, Y, F or W (SEQ ID NO: 130); and (iii) a HVR-L3 comprising the amino acid sequence AGGYGGGGX₁YA, wherein X₁ is L or R (SEQ ID NO: 131).

7. The antibody of claim 6, wherein,
(a) the antibody of 6(b), further comprises a heavy chain variable domain framework FR1 comprising the amino acid sequence of SEQ ID NO: 132, 133, or 134; FR2 comprising the amino acid sequence of SEQ ID NO: 135 or 136; FR3 comprising the amino acid sequence of SEQ ID NO: 137; and FR4 comprising the amino acid sequence of SEQ ID NO: 138; or
(b) the antibody of claim 6 (d), further comprises a light chain variable domain framework FR1 comprising the amino acid sequence of SEQ ID NO: 139; FR2 comprising the amino acid sequence of SEQ ID NO: 140 or 141; FR3 comprising the amino acid sequence of SEQ ID NO: 142 or 143; and FR4 comprising the amino acid sequence of SEQ ID NO: 144.

8. The antibody of claim 1, comprising (a) a VH sequence having at least 95% sequence identity to the amino acid sequence of SEQ ID NO: 13, 16-30, 32-34, 86-94, or 95; (b) a VL sequence having at least 95% sequence identity to the amino acid sequence of SEQ ID NO: 15, 31, 35-38, 96-98, or 99; or (c) a VH sequence of SEQ ID NO: 13, 16-30, 32-34, 86-94, or 95, and a VL sequence of SEQ ID NO: 15, 31, 35-38, 96-98, or 99.

9. The antibody of claim 8, further comprising a variant Fc region amino acid sequence of SEQ ID NO: 229-380, or 381.

10. An isolated nucleic acid encoding the antibody of claim 1.

11. A host cell comprising the nucleic acid of claim 10.

12. A method of producing an anti-myostatin antibody comprising:
(a) culturing the host cell of claim 11 so that the antibody is produced; or
(b) immunizing an animal against a polypeptide, wherein the polypeptide comprises the region corresponding to amino acids at positions 21 to 100 of myostatin propeptide (SEQ ID NO: 78).

13. A method of detecting the presence of latent myostatin or myostatin propeptide comprising
(a) contacting a biological sample with the antibody of claim 2 under conditions permissive for binding of the antibody to latent myostatin or myostatin propeptide, and
(b) detecting whether a complex is formed between the antibody and the latent myostatin or myostatin propeptide.

14. A method of blocking release of mature myostatin from latent myostatin in a biological sample comprising contacting a biological sample containing latent myostatin with the antibody of claim 2 under conditions permissive for binding of the antibody to the latent myostatin, and blocking release of mature myostatin from the latent myostatin.

15. A method of reducing the concentration of latent myostatin in a biological sample comprising contacting a biological sample containing latent myostatin with the antibody of claim 2 under conditions permissive for binding of the antibody to the latent myostatin, and removing the complex formed between the antibody and the latent myostatin.

16. A pharmaceutical formulation comprising the antibody of claim 1 and a pharmaceutically acceptable carrier.

17. A method of treating an individual having a muscle wasting disease comprising administering to the individual an effective amount of the antibody of claim 1.

18. A method of increasing mass of muscle tissue in an individual comprising administering to the individual an effective amount of the antibody of claim 1 to increase mass of muscle tissue.

19. A method of increasing strength of muscle tissue in an individual comprising administering to the individual an effective amount of the antibody of claim 1 to increase strength of muscle tissue.

20. A method of reducing body fat accumulation in an individual comprising administering to the individual an effective amount of the antibody of claim 1 to reduce body fat accumulation.

21. A polypeptide comprising a variant Fc region comprising at least one amino acid alteration in a parent Fc region, wherein the ratio of [KD value of the parent Fc region for monkey FcγRIIb]/[KD value of the variant Fc region for monkey FcγRIIb] is 2.0 or greater, and the ratio of [KD value of the parent Fc region for monkey FcγRIIIa]/[KD value of the variant Fc region for monkey FcγRIIIa] is 0.5 or smaller.

22. The polypeptide of claim 21, further wherein the ratio of [KD value of the parent Fc region for human FcγRIIb]/[KD value of the variant Fc region for human FcγRIIb] is 2.0 or greater, and the ratio of [KD value of the parent Fc region for human FcγRIIIa]/[KD value of the variant Fc region for human FcγRIIIa] is 0.5 or smaller.

23. The polypeptide of claim 22, further wherein the ratio of [KD value of the parent Fc region for human FcγRIIa (type H)]/[KD value of the variant Fc region for human FcγRIIa (type H)] is 5.0 or smaller.

24. The polypeptide of claim 23, further wherein the ratio of [KD value of the parent Fc region for human FcγRIa (type R)]/[KD value of the variant Fc region for human FcγRIIa (type R)] is 5.0 or smaller.

25. The polypeptide of claim 21, wherein the KD value of the variant Fc region for monkey FcγRIIb is 1.0×10⁻⁶ M or smaller, and the KD value of the variant Fc region for monkey FcγRIIIa is 5.0×10⁻⁷ M or greater.

26. The polypeptide of claim 22, wherein the KD value of the variant Fc region for human FcγRIIb is 2.0×10⁻⁶ M or smaller, and the KD value of the variant Fc region for human FcγRIIIa is 1.0×10⁻⁶ M or greater.

27. The polypeptide of claim 23, wherein the KD value of the variant Fc region for human FcγRIIa (type H) is 1.0×10⁻⁷ M or greater.

28. The polypeptide of claim 24, wherein the KD value of the variant Fc region for human FcγRIIa (type R) is 2.0×10⁻⁷ M or greater.

29. The polypeptide of claim 21, wherein the variant Fc region comprises at least one amino acid alteration of at least one position selected from the group consisting of: 231, 232, 233, 234, 235, 236, 237, 238, 239, 264, 266, 267, 268, 271, 295, 298, 325, 326, 327, 328, 330, 331, 332, 334, and 396, according to EU numbering.

30. The polypeptide of claim 29, wherein the variant Fc region comprises at least two amino acid alterations comprising:
(a) one amino acid alteration at position 236, and
(b) at least one amino acid alteration of at least one position selected from the group consisting of:
(i) position 231, 232, 233, 234, 235, 237, 238, 239, 264, 266, 267, 268, 271, 295, 298, 325, 326, 327, 328, 330, 331, 332, 334, and 396;
(ii) position: 231, 232, 235, 239, 268, 295, 298, 326, 330, and 396; or
(iii) position 268, 295, 326, and 330;
according to EU numbering.

31. The polypeptide according to claim 29, wherein the variant Fc region comprises at least one amino acid selected from the group consisting of:
(a) Asp, Glu, Phe, Gly, His, Ile, Lys, Leu, Met, Asn, Pro, Gln, Arg, Ser, Thr, Val, Trp, Tyr at position 231,
(b) Ala, Asp, Glu, Phe, Gly, His, Ile, Lys, Leu, Met, Asn, Gln, Arg, Ser, Thr, Val, Trp, Tyr at position 232,
(c) Asp at position 233,
(d) Trp, Tyr at position 234,
(e) Trp at position 235,
(f) Ala, Asp, Glu, His, Ile, Leu, Met, Asn, Gln, Ser, Thr, Val at position 236,
(g) Asp, Tyr at position 237,
(h) Glu, lie, Met, Gln, Tyr at position 238,
(i) Ile, Leu, Asn, Pro, Val at position 239,
(j) Ile at position 264,
(k) Phe at position 266,
(l) Ala, His, Leu at position 267,
(m) Asp, Glu at position 268,
(n) Asp, Glu, Gly at position 271,
(o) Leu at position 295,
(p) Leu at position 298,
(q) Glu, Phe, Ile, Leu at position 325,
(r) Thr at position 326,
(s) Ile, Asn at position 327,
(t) Thr at position 328,
(u) Lys, Arg at position 330,
(v) Glu at position 331,
(w) Asp at position 332,
(x) Asp, Ile, Met, Val, Tyr at position 334, and
(y) Ala, Asp, Glu, Phe, Gly, His, Ile, Lys, Leu, Met, Asn, Gln, Arg, Ser, Thr, Val, Trp, Tyr at position 396;
according to EU numbering.

32. The polypeptide according to claim 31, wherein the variant Fc region comprises at least one amino acid selected from the group consisting of:
(a) Gly, Thr at position 231,
(b) Asp at position 232,
(c) Trp at position 235,
(d) Asn, Thr at position 236,
(e) Val at position 239,
(f) Asp, Glu at position 268,
(g) Leu at position 295,
(h) Leu at position 298,
(i) Thr at position 326,
(j) Lys, Arg at position 330, and
(k) Lys, Met at position 396;
according to EU numbering.

33. A polypeptide comprising a variant Fc region comprising at least two amino acid alterations in a parent Fc region, wherein each of the amino acid alterations increases the isoelectric point (pI) of the variant Fc region compared with that of the parent Fc region.

34. The polypeptide of claim 33, wherein the amino acid alterations are exposed on the surface of the variant Fc region.

35. The polypeptide of claim 33, further comprising an antigen-binding domain.

36. The polypeptide of claim 35 wherein antigen-binding activity of the antigen-binding domain changes according to ion concentration conditions.

37. The polypeptide of claim 33, wherein the variant Fc region comprises at least two amino acid alterations of at least two positions selected from the group consisting of: 285, 311, 312, 315, 318, 333, 335, 337, 341, 342, 343, 384, 385, 388, 390, 399, 400, 401, 402, 413, 420, 422, and 431, according to EU numbering.

38. The polypeptide of claim 37, wherein the variant Fc region comprises Arg or Lys at each of the positions selected.

39. A polypeptide comprising a variant Fc region comprising amino acid alterations described in Tables 14-30.

40. The polypeptide of claim 21, wherein the parent Fc region is derived from human IgG1.

41. The polypeptide of claim 21 wherein the polypeptide is an antibody or an Fc fusion protein.

42. An isolated nucleic acid encoding the polypeptide of claim 21.

43. A host cell comprising the nucleic acid of claim 42.

44. A method of producing a polypeptide comprising a variant Fc region, the method comprising culturing the host cell of claim 43 so that the polypeptide is produced.

45. A method of suppressing the activation of an immune cell in a biological sample comprising contacting a biological sample containing an immune cell with the polypeptide of claim 21 under conditions permissive for binding of the polypeptide to the immune cell, and suppressing the activation of the immune cell; optionally wherein the immune cell is a B cell, mast cell, dendritic cell, or basophil.

46. A pharmaceutical formulation comprising the polypeptide of claim 21 and a pharmaceutically acceptable carrier.

47. A method of treating an individual having an immunological inflammatory disease, autoimmune disease, or viral infection comprising administering to the individual an effective amount of the polypeptide of claim 21.

48. A polypeptide comprising the amino acid sequence of SEQ ID NO: 229-380, or 381.

49. An isolated nucleic acid encoding the polypeptide of claim 48.

50. A host cell comprising the nucleic acid of claim 49.

51. A method of producing a polypeptide comprising a variant Fc region, the method comprising culturing the host cell of claim 48 so that the polypeptide is produced.

52. A method of suppressing the activation of an immune cell in a biological sample comprising contacting a biological sample containing an immune cell with the polypeptide of claim 48 under conditions permissive for binding of the polypeptide to the immune cell, and suppressing the activation of the immune cell; optionally wherein the immune cell is a B cell, mast cell, dendritic cell, or basophil.

53. A pharmaceutical formulation comprising the polypeptide of claim 46 and a pharmaceutically acceptable carrier.

54. A method of treating an individual having an immunological inflammatory disease, autoimmune disease, or viral infection comprising administering to the individual an effective amount of the polypeptide of claim 48.

The application's sequence listing, which the Patent Office published only in electronic form, follows.

SEQUENCE LISTING (381 sequences)

SEQ ID NO: 1 - protein, 375 aa, Homo sapiens
MQKLQLCVYIYLFMLIVAGPVDLNENSEQKENVEKEGLCNACTWRQNTKSSRIEAIKIQILSKLRLETAPNISKDVIRQLLPKAPPLRELIDQYDVQRDDSSDGSLEDDDYHATTETIITMPTESDFLMQVDGKPKCCFFKFSSKIQYNKVVKAQLWIYLRPVETPTTVFVQILRLIKPMKDGTRYTGIRSLKLDMNPGTGIWQSIDVKTVLQNWLKQPESNLGIEIKALDENGHDLAVTFPGPGEDGLNPFLEVKVTDTPKRSRRDFGLDCDEHSTESRCCRYPLTVDFEAFGWDWIIAPKRYKANYCSGECEFVFLQKYPHTHLVHQANPRGSAGPCCTPTKMSPINMLYFNGKEQIIYGKIPAMVVDRCGCS

SEQ ID NO: 2 - protein, 109 aa, Homo sapiens
DFGLDCDEHSTESRCCRYPLTVDFEAFGWDWIIAPKRYKANYCSGECEFVFLQKYPHTHLVHQANPRGSAGPCCTPTKMSPINMLYFNGKEQIIYGKIPAMVVDRCGCS

SEQ ID NO: 3 - protein, 375 aa, Artificial Sequence
  cynomolgous monkey  myostatin (promyostatin)
MQKLQLCVYIYLFMLIVAGPVDLNENSEQKENVEKEGLCNACTWRQNTKSSRIEAIKIQILSKLRLETAPNISKDAIRQLLPKAPPLRELIDQYDVQRDDSSDGSLEDDDYHATTETIITMPTESDFLMQVDGKPKCCFFKFSSKIQYNKVVKAQLWIYLRPVETPTTVFVQILRLIKPMKDGTRYTGIRSLKLDMNPGTGIWQSIDVKTVLQNWLKQPESNLGIEIKALDENGHDLAVTFPGPGEDGLNPFLEVKVTDTPKRSRRDFGLDCDEHSTESRCCRYPLTVDFEAFGWDWIIAPKRYKANYCSGECEFVFLQKYPHTHLVHQANPRGSAGPCCTPTKMSPINMLYFNGKEQIIYGKIPAMVVDRCGCS

SEQ ID NO: 4 - protein, 109 aa, artificial sequence; identical to SEQ ID NO: 2
  cynomolgous monkey myostatin mature form

SEQ ID NO: 5 - protein, 376 aa, mus musculus
MMQKLQMYVYIYLFMLIAAGPVDLNEGSEREENVEKEGLCNACAWRQNTRYSRIEAIKIQILSKLRLETAPNISKDAIRQLLPRAPPLRELIDQYDVQRDDSSDGSLEDDDYHATTETIITMPTESDFLMQADGKPKCCFFKFSSKIQYNKVVKAQLWIYLRPVKTPTTVFVQILRLIKPMKDGTRYTGIRSLKLDMSPGTGIWQSIDVKTVLQNWLKQPESNLGIEIKALDENGHDLAVTFPGPGEDGLNPFLEVKVTDTPKRSRRDFGLDCDEHSTESRCCRYPLTVDFEAFGWDWIIAPKRYKANYCSGECEFVFLQKYPHTHLVHQANPRGSAGPCCTPTKMSPINMLYFNGKEQIIYGKIPAMVVDRCGCS

SEQ ID NO: 6 - protein, 109 aa, mus musculus; identical to SEQ ID NO: 2

SEQ ID NO: 7 - protein, 328 aa, Homo sapiens
ASTKGPSVFPLAPSSKSTSGGTAALGCLVKDYFPEPVTVSWNSGALTSGVHTFPAVLQSSGLYSLSSVVTVPSSSLGTQTYICNVNHKPSNTKVDKKVEPKSCDKTHTCPPCPAPELLGGPSVFLFPPKPKDTLMISRTPEVTCVVVDVSHEDPEVKFNWYVDGVEVHNAKTKPREEQYNSTYRVVSVLTVLHQDWLNGKEYKCKVSNKALPAPIEKTISKAKGQPREPQVYTLPPSREEMTKNQVSLTCLVKGFYPSDIAVEWESNGQPENNYKTTPPVLDSDGSFFLYSKLTVDKSRWQQGNVFSCSVMHEALHNHYTQKSLSLSP

SEQ ID NO: 8 - protein, 107 aa, Homo sapiens
RTVAAPSVFIFPPSDEQLKSGTASVVCLLNNFYPREAKVQWKVDNALQSGNSQESVTEQDSKDCTYSLSSTLTLSKADYEKHKVYACEVTHQGLSSPVTKSFNRGEC

SEQ ID NO: 9 - protein, 328 aa, Homo sapiens; identical to SEQ ID NO: 7

SEQ ID NO: 10 - protein, 107 aa, Homo sapiens [sequence omitted]

SEQ ID NO: 11 - protein, 328 aa, Homo sapiens
ASTKGPSVFPLAPSSKSTSGGTAALGCLVKDYFPEPVTVSWNSGALTSGVHTFPAVLQSSGLYSLSSVVTVPSSSLGTQTYICNVNHKPSNTKVDKKVEPKSCDKTHTCPPCPAPELRGGPKVFLFPPKPKDTLMISRTPEVTCVVVDVSHEDPEVKFNWYVDGVEVHNAKTKPREEQYNSTYRVVSVLTVLHQDWLNGKEYKCKVSNKALPAPIEKTISKAKGQPREPQVYTLPPSRDELTKNQVSLTCLVKGFYPSDIAVEWESNGQPENNYKTTPPVLDSDGSFFLYSKLTVDKSRWQQGNVFSCSVMHEALHNHYTQKSLSLSP

SEQ ID NO: 12 - protein, 116 aa, Oryctolagus Cuniculus
QSLEESGGRLVTPGGSLTVTCRVSGIDLSSYDISWVRQAPGKGLEWIGIISYAGSTYYASWAKGRFTISKTSTTVDLKMTSLTTEDTATYFCARGVPAYSTGGDLWGPGTLVTVSS

SEQ ID NO: 13 - protein, 119 aa, artificial sequence
  synthetic humanized sequence- MS1032LO00 VH
QVTLKESGPVLVKPTETLTLTCTVSGIDLSSYDISWVRQAPGKGLEWVGIISYAGSTYYASWAKGRLTISKDTSKNQVVLTMTNMDPVDTATYYCARGVPAYSTGGDLWGQGTLVTVSS

SEQ ID NO: 14 - protein, 110 aa, Oryctolagus Cuniculus
AQVLTQTASSVSAAVGGTVTINCQSSQSVYDNNWLSWFQQKPGQPPKLLIYWASTLASGVPSRFKGSGSGTQFTLTISDLECDDAATYYCAGGYGGGLYAFGGGTKVEIK

SEQ ID NO: 15 - protein, 110 aa, artificial sequence
  synthetic humanized sequence-MS1032LO00 VL
DIVMTQSPATLSLSPGERATLSCQSSQSVYDNNWLSWFQQKPGQPPKLLIYWASTLASGVPSRFSGSGSGTDFTLTISSLQPEDAATYYCAGGYGGGLYAFGQGTKVEIK

SEQ ID NO: 16 - protein, 119 aa, Homo sapiens
QVTLKESGPVLVKPTETLTLTCTVSGIDLSHYDISWVRQAPGKGLEWVGIISYAGSTYYASWAKGRLTISKDTSKNQVVLTMTNMDPVDTATYYCARGVPAYSTGGDLWGQGTLVTVSS

SEQ ID NO: 17 - protein, 119 aa, Homo sapiens
QVTLKESGPVLVKPTETLTLTCTVSGIDLSSYDISWVRQAPGKGLEWVGIISHAGSTYYASWAKGRLTISKDTSKNQVVLTMTNMDPVDTATYYCARGVPAYSTGGDLWGQGTLVTVSS

SEQ ID NO: 18 - protein, 119 aa, Homo sapiens
QVTLKESGPVLVKPTETLTLTCTVSGIDLSSYDISWVRQAPGKGLEWVGIISYAGSTYYASWAKGRLTISKDTSKNQVVLTMTNMDPVDTATYYCARGVPAHSTGGDLWGQGTLVTVSS

SEQ ID NO: 19 - protein, 119 aa, Homo sapiens
QVTLKESGPVLVKPTETLTLTCTVSGIDLSSYDISWVRQAPGKGLEWVGIISYAGSTYYASWAKGRLTISKDTSKNQVVLTMTNMDPVDTATYYCARGVPAYSHGGDLWGQGTLVTVSS

SEQ ID NO: 20 - protein, 119 aa, Homo sapiens
QVTLKESGPVLVKPTETLTLTCTVSGIDLSHYDISWVRQAPGKGLEWVGIISHAGSTYYASWAKGRLTISKDTSKNQVVLTMTNMDPVDTATYYCARGVPAYSTGGDLWGQGTLVTVSS

SEQ ID NO: 21 - protein, 119 aa, Homo sapiens
QVTLKESGPVLVKPTETLTLTCTVSGIDLSSYDISWVRQAPGKGLEWVGIISHAGSTYYASWAKGRLTISKDTSKNQVVLTMTNMDPVDTATYYCARGVPAHSTGGDLWGQGTLVTVSS

SEQ ID NO: 22 - protein, 119 aa, Homo sapiens
QVTLKESGPVLVKPTETLTLTCTVSGIDLSHYDISWVRQAPGKGLEWVGIISYAGSTYYASWAKGRLTISKDTSKNQVVLTMTNMDPVDTATYYCARGVPAHSTGGDLWGQGTLVTVSS

SEQ ID NO: 23 - protein, 119 aa, Homo sapiens
QVTLKESGPVLVKPTETLTLTCTVSGIDLSHYDISWVRQAPGKGLEWVGIISHAGSTYYASWAKGRLTISKDTSKNQVVLTMTNMDPVDTATYYCARGVPAHSTGGDLWGQGTLVTVSS

SEQ ID NO: 24 - protein, 119 aa, Homo sapiens
QVTLKESGPVLVKPTETLTLTCTVSGIDLSHYDISWVRQAPGKGLEWVGIISYAGSTYYASWAKGRLTISKDTSKNQVVLTMTNMDPVDTATYYCARGVPAYSHGGDLWGQGTLVTVSS

SEQ ID NO: 25 - protein, 119 aa, Homo sapiens
QVTLKESGPVLVKPTETLTLTCTVSGIDLSSYDISWVRQAPGKGLEWVGIISHAGSTYYASWAKGRLTISKDTSKNQVVLTMTNMDPVDTATYYCARGVPAYSHGGDLWGQGTLVTVSS

SEQ ID NO: 26 - protein, 119 aa, Homo sapiens
QVTLKESGPVLVKPTETLTLTCTVSGIDLSSYDISWVRQAPGKGLEWVGIISYAGSTYYASWAKGRLTISKDTSKNQVVLTMTNMDPVDTATYYCARGVPAHSHGGDLWGQGTLVTVSS

SEQ ID NO: 27 - protein, 119 aa, Homo sapiens
QVTLKESGPVLVKPTETLTLTCTVSGIDLSHYDISWVRQAPGKGLEWVGIISHAGSTYYASWAKGRLTISKDTSKNQVVLTMTNMDPVDTATYYCARGVPAYSHGGDLWGQGTLVTVSS

SEQ ID NO: 28 - protein, 119 aa, Homo sapiens
QVTLKESGPVLVKPTETLTLTCTVSGIDLSSYDISWVRQAPGKGLEWVGIISHAGSTYYASWAKGRLTISKDTSKNQVVLTMTNMDPVDTATYYCARGVPAHSHGGDLWGQGTLVTVSS

SEQ ID NO: 29 - protein, 119 aa, Homo sapiens
QVTLKESGPVLVKPTETLTLTCTVSGIDLSHYDISWVRQAPGKGLEWVGIISYAGSTYYASWAKGRLTISKDTSKNQVVLTMTNMDPVDTATYYCARGVPAHSHGGDLWGQGTLVTVSS

SEQ ID NO: 30 - protein, 119 aa, Homo sapiens
QVTLKESGPVLVKPTETLTLTCTVSGIDLSHYDISWVRQAPGKGLEWVGIISHAGSTYYASWAKGRLTISKDTSKNQVVLTMTNMDPVDTATYYCARGVPAHSHGGDLWGQGTLVTVSS

SEQ ID NO: 31 - protein, 110 aa, artificial sequence
  synthetic humanized sequence-MS103202L008 VL
DIVMTQSPATLSLSPGERATLSCQSSQSVYHNNWLSWFQQKPGQPPKLLIYWASTLASGVPSRFSGSGSGTDFTLTISSLQPEDAATYYCAGGYGGGLYAFGQGTKVEIK

SEQ ID NO: 32 - protein, 119 aa, artificial sequence
  synthetic humanized sequence- MS1032LO01 VH
QVTLKESGPVLVKPTETLTLTCTVSGIDLSHTDISWVRQAPGKGLEWVGIISYAGSTYYASWAKGRLTISKDTSKNQVVLTMTNMDPVDTATYYCARGVPAYSHGGDLWGQGTLVTVSS

SEQ ID NO: 33 - protein, 119 aa, artificial sequence
  synthetic humanized sequence-MS1032LO02, 03 VH
QVTLKESGPVLVKPTETLTLTCTVSGIDLSHTDISWVRQAPGKGLEWVGIISYAGSTYYMSWAKGRLTISKDTSKNQVVLTMTNMDPVDTATYYCARGVPAYSHGGDLWGQGTLVTVSS

SEQ ID NO: 34 - protein, 119 aa, artificial sequence; identical to SEQ ID NO: 24
  synthetic humanized sequence-MS1032LO04 VH

SEQ ID NO: 35 - protein, 110 aa, artificial sequence
  synthetic humanized sequence-MS1032LO01 VL
DIVMTQSPATLSLSPGERATLSCTSSQSVYHNNWLSWFQQKPGQPPKLLIYWASTLAYGVPSRFSGSGSGTDFTLTISSLQPEDAATYYCAGGYGGGRYAFGQGTKVEIK

SEQ ID NO: 36 - protein, 110 aa, artificial sequence
  synthetic humanized sequence-MS1032LO02 VL
DIVMTQSPATLSLSPGERATLSCQSSQSVYHNNWLSWFQQKPGQPPKLLIYWASTLAFGVPSRFSGSGSGTDFTLTISSLQPEDAATYYCAGGYGGGLYAFGQGTKVEIK

SEQ ID NO: 37 - protein, 110 aa, artificial sequence
  synthetic humanized sequence-MS1032LO03 VL
DIVMTQSPATLSLSPGERATLSCQTSQSVYHDNWLSWFQQKPGQPPKLLIYWASTLASGVPSRFSGSGSGTDFTLTISSLQPEDAATYYCAGGYGGGRYAFGQGTKVEIK

SEQ ID NO: 38 - protein, 110 aa, artificial sequence
  synthetic humanized sequence-MS1032LO04 VL
DIVMTQSPATLSLSPGERATLSCTSSQSVYHDNWLSWFQQKPGQPPKLLIYWASTLAYGVPSRFSGSGSGTDFTLTISSLQPEDAATYYCAGGYGGGLYAFGQGTKVEIK

SEQ ID NO: 39 - DNA, 348 bp, Oryctolagus Cuniculus
cagtcgctggaggagtccgggggtcgcctggtaacgcctggaggatccctgacagtcacctgcagagtctctggaatcgacctcagtagttacgacatcagctgggtccgccaggctccagggaaggggctggagtggatcggaatcattagttatgctggtagcacatactacgcgagctgggcaaaaggccgattcaccatctccaaaacctcgaccacggtggatctgaaaatgaccagtctgacaaccgaggacacggccacctatttctgtgccagaggtgtgcctgcttatagtactggtggtgacttgtggggcccaggcaccctggtcaccgtctcctcc

SEQ ID NO: 40 - DNA, 357 bp, Artificial Sequence
  synthetic humanized sequence-MS1032LO00 VH
caggtgacactgaaagaaagcggccccgtgctggtgaagccaaccgagacactgactctgacctgcacagtgagtgggatcgacctgagcagctacgacatctcctgggtgcggcaggcacccggaaagggcctggaatgggtcggcatcattagctacgccgggagcacatactatgccagctgggctaaaggaagactgactatctccaaggacacctctaaaaaccaggtggtcctgactatgaccaatatggaccccgtggatacagcaacttactattgtgccaggggcgtccctgcttactctaccggaggggatctgtggggacagggaaccctggtgacagtctctagt

SEQ ID NO: 41 - DNA, 330 bp, Oryctolagus Cuniculus
gcgcaagtgctgacccagactgcatcatccgtgtctgcagctgtgggaggcacagtcaccatcaattgccagtccagtcagagtgtttatgataacaactggttatcctggtttcagcagaaaccagggcagcctcccaagctcctgatctattgggcatccactctggcatctggggtcccatcgcggttcaaaggcagtggatctgggacacagttcactctcaccatcagcgacctggagtgtgacgatgctgccacttactactgtgcaggcggttatggtggtggtctgtatgctttcggcggagggaccaaggtggagatcaaa

SEQ ID NO: 42 - DNA, 330 bp, artificial sequence
  synthetic humanized sequence-MS1032LO00 VL
gacattgtgatgactcagtctcctgccactctgtcactgagccctggcgagcgagcaaccctgtcttgccagagcagccagtccgtgtacgacaacaattggctgagctggttccagcagaagccagggcagccccctaaactgctgatctattgggcatcaacactggccagcggcgtcccctccagattctccggatctggcagtgggactgactttaccctgaccatcagcagcctccagcccgaggatgccgctacctactattgtgctggcgggtacggaggcgggctgtatgcatttggacagggcacaaaggtggaaatcaaa

SEQ ID NO: 43 - DNA, 357 bp, artificial sequence
  synthetic humanized sequence-MS1032LO01 VH
caggtgacactgaaagaaagcggccccgtgctggtgaagccaaccgagacactgactctgacctgcacagtgagtgggatcgacctgagccacaccgacatctcctgggtgcggcaggcacccggaaagggcctggaatgggtcggcatcattagctacgccgggagcacatactatgccagctgggctaaaggaagactgactatctccaaggacacctctaaaaaccaggtggtcctgactatgaccaatatggaccccgtggatacagcaacttactattgtgccaggggcgtccctgcttactctcacggaggggatctgtggggacagggaaccctggtgacagtctctagt

SEQ ID NO: 44 - DNA, 357 bp, artificial sequence
  synthetic humanized sequence-MS1032LO02, 03 VH
caggtgacactgaaagaaagcggccccgtgctggtgaagccaaccgagacactgactctgacctgcacagtgagtgggatcgacctgagccacaccgacatctcctgggtgcggcaggcacccggaaagggcctggaatgggtcggcatcattagctacgccgggagcacatactatatgagctgggctaaaggaagactgactatctccaaggacacctctaaaaaccaggtggtcctgactatgaccaatatggaccccgtggatacagcaacttactattgtgccaggggcgtccctgcttactctcacggaggggatctgtggggacagggaaccctggtgacagtctctagt

SEQ ID NO: 45 - DNA, 357 bp, artificial sequence
  synthetic humanized sequence-MS1032LO04 VH
caggtgacactgaaagaaagcggccccgtgctggtgaagccaaccgagacactgactctgacctgcacagtgagtgggatcgacctgagccactacgacatctcctgggtgcggcaggcacccggaaagggcctggaatgggtcggcatcattagctacgccgggagcacatactatgccagctgggctaaaggaagactgactatctccaaggacacctctaaaaaccaggtggtcctgactatgaccaatatggaccccgtggatacagcaacttactattgtgccaggggcgtccctgcttactctcacggaggggatctgtggggacagggaaccctggtgacagtctctagt

SEQ ID NO: 46 - DNA, 330 bp, artificial sequence
  synthetic humanized sequence-MS1032LO01 VL
gacattgtgatgactcagtctcctgccactctgtcactgagccctggcgagcgagcaaccctgtcttgcaccagcagccagtccgtgtaccacaacaattggctgagctggttccagcagaagccagggcagccccctaaactgctgatctattgggcatcaacactggcctacggcgtcccctccagattctccggatctggcagtgggactgactttaccctgaccatcagcagcctccagcccgaggatgccgctacctactattgtgctggcgggtacggaggcgggcggtatgcatttggacagggcacaaaggtggaaatcaaa

SEQ ID NO: 47 - DNA, 330 bp, artificial sequence
  synthetic humanized sequence-MS1032LO02 VL
gacattgtgatgactcagtctcctgccactctgtcactgagccctggcgagcgagcaaccctgtcttgccagagcagccagtccgtgtaccacaacaattggctgagctggttccagcagaagccagggcagccccctaaactgctgatctattgggcatcaacactggccttcggcgtcccctccagattctccggatctggcagtgggactgactttaccctgaccatcagcagcctccagcccgaggatgccgctacctactattgtgctggcgggtacggaggcgggctgtatgcatttggacagggcacaaaggtggaaatcaaa

SEQ ID NO: 48 - DNA, 330 bp, artificial sequence
  synthetic humanized sequence-MS1032LO03 VL
gacattgtgatgactcagtctcctgccactctgtcactgagccctggcgagcgagcaaccctgtcttgccagaccagccagtccgtgtaccacgacaattggctgagctggttccagcagaagccagggcagccccctaaactgctgatctattgggcatcaacactggccagcggcgtcccctccagattctccggatctggcagtgggactgactttaccctgaccatcagcagcctccagcccgaggatgccgctacctactattgtgctggcgggtacggaggcgggcggtatgcatttggacagggcacaaaggtggaaatcaaa

SEQ ID NO: 49 - DNA, 330 bp, artificial sequence
  synthetic humanized sequence-MS1032LO04 VL
gacattgtgatgactcagtctcctgccactctgtcactgagccctggcgagcgagcaaccctgtcttgcaccagcagccagtccgtgtaccacgacaattggctgagctggttccagcagaagccagggcagccccctaaactgctgatctattgggcatcaacactggcctacggcgtcccctccagattctccggatctggcagtgggactgactttaccctgaccatcagcagcctccagcccgaggatgccgctacctactattgtgctggcgggtacggaggcgggctgtatgcatttggacagggcacaaaggtggaaatcaaa

SEQ ID NO: 50 - DNA, 987 bp, Homo sapiens
gcttccaccaagggcccatcggtcttccccctggcaccctcctccaagtccacctctgggggcacagcggccctgggctgcctggtcaaggactacttccccgaaccggtgacggtgtcgtggaactcaggcgccctgacctccggcgtgcacaccttcccggctgtcctacagtcctcaggactctactccctctcctccgtggtgaccgtgccctcctcgtccttgggcacccagacctacatctgcaacgtgaatcacaagccctccaacaccaaggtggacaagaaagttgagcccaaatcttgtgacaaaactcacacatgcccaccgtgcccagcacctgaactcctggggggaccgtcagtcttcctcttccccccaaaacccaaggacaccctcatgatctcccggacccctgaggtcacatgcgtggtggtggacgtgtcccacgaagaccctgaggtcaagttcaactggtacgtggacggcgtggaggtgcataatgccaagacaaagccgcgggaggagcagtacaactccacgtaccgtgtggtctccgtcctcaccgtcctgcaccaggactggctgaatggcaaggagtacaagtgcaaggtctccaacaaagccctcccagcccccatcgagaaaaccatctccaaagccaaagggcagccccgagaaccacaggtgtacaccctgcccccatcccgggaggaaatgaccaagaaccaggtctccctgacctgcctggtcaaaggcttctatccctccgacatcgccgtggagtgggagtccaatgggcagccggagaacaactacaagaccacgcctcccgtgctggactccgacggctccttcttcctctactccaagctcaccgtggacaagtccaggtggcagcaggggaacgtcttctcatgctccgtgatgcatgaggctctgcacaaccactacacgcagaagtcgctctccctgtctccgtag

SEQ ID NO: 51 - DNA, 984 bp, Homo sapiens
gctagcaccaagggcccatcggtcttccccctggcaccctcctccaagagcacctctgggggcacagcggccctgggctgcctggtcaaggactacttccccgaaccggtgacggtgtcgtggaactcaggcgccctgaccagcggcgtgcacaccttcccggctgtcctacagtcctcaggactctactccctcagcagcgtggtgaccgtgccctccagcagcttgggcacccagacctacatctgcaacgtgaatcacaagcccagcaacaccaaggtggacaagaaagttgagcccaaatcttgtgacaaaactcacacatgcccaccgtgcccagcacctgaactccgggggggaccgaaagtcttcctcttccccccaaaacccaaggacaccctcatgatctcccggacccctgaggtcacatgcgtggtggtggacgtgagccacgaagaccctgaggtcaagttcaactggtacgtggacggcgtggaggtgcataatgccaagacaaagccgcgggaggagcagtacaacagcacgtaccgtgtggtcagcgtcctcaccgtcctgcaccaggactggctgaatggcaaggagtacaagtgcaaggtctccaacaaagccctcccagcccccatcgagaaaaccatctccaaagccaaagggcagccccgagaaccacaggtgtacaccctgcccccatcccgggatgagctgaccaagaaccaggtcagcctgacctgcctggtcaaaggcttctatcccagcgacatcgccgtggagtgggagagcaatgggcagccggagaacaactacaagaccacgcctcccgtgctggactccgacggctccttcttcctctacagcaagctcaccgtggacaagagcaggtggcagcaggggaacgtcttctcatgctccgtgatgcatgaggctctgcacaaccactacacgcagaagagcctctccctgtctccg

SEQ ID NO: 52 - DNA, 987 bp, Homo sapiens
gcttccaccaagggcccatcggtcttccccctggcaccctcctccaagtcgacctctgggggcacagcggccctgggctgcctggtcaaggactacttccccgaaccggtgacggtgtcgtggaactcaggcgccctgaccagtggcgtgcacaccttcccggctgtcctacagtcctcaggactctactccctcagtagtgtggtgaccgtgccctccagtagtttgggcacccagacctacatctgcaacgtgaatcacaagcccagtaacaccaaggtggacaagaaagttgagcccaaatcttgtgacaaaactcacacatgcccaccgtgcccagcacctgagctcctggggggaccgtcagtcttcctcttccccccaaaacccaaggacaccctcatgatctcccggacccctgaggtcacatgcgtggtggtggacgtgagtcacgaagaccctgaggtcaagttcaactggtacgtggacggcgtggaggtgcataatgccaagacaaagccgcgggaggagcagtacaacagtacgtaccgtgtggtcagtgtcctcaccgtcctgcaccaggactggctgaatggcaaggagtacaagtgcaaggtctccaacaaagccctcccagcccccatcgagaaaaccatctccaaagccaaagggcagccccgagaaccacaggtgtacaccctgcccccatcccgggaggagatgaccaagaaccaggtcagtctgacctgcctggtcaaaggcttctatcccagtgacatcgccgtggagtgggagagtaatgggcagccggagaacaactacaagaccacgcctcccgtgctggactccgacggctccttcttcctctacagtaagctcaccgtggacaagagtaggtggcagcaggggaacgtcttctcatgctccgtgatgcatgaggctctgcacaaccactacacgcagaagagtctctccctgtctccgtga

SEQ ID NO: 53 - DNA, 324 bp, Homo sapiens
cgtacggtggctgcaccatctgtcttcatcttcccgccatctgatgagcagttgaaatctggaactgcctctgttgtgtgcctgctgaataacttctatcccagagaggccaaagtacagtggaaggtggataacgccctccaatcgggtaactcccaggagagtgtcacagagcaggactccaaggactgcacctactccctctcctccaccctgacgctgtccaaagcagactacgagaaacacaaagtctacgcctgcgaagtcacccatcagggcctgtcctcgcccgtcacaaagtccttcaacaggggagagtgttga

SEQ ID NO: 54 - DNA, 324 bp, Homo sapiens
cgtacggtggctgcaccatctgtcttcatcttcccgccatctgatgagcagttgaaatctggtaccgcctctgttgtgtgcctgctgaataacttctatcccagagaggccaaagtacagtggaaggtggataacgccctccaatcgggtaactcccaggagagtgtcacagagcaggacagtaaggacagtacctacagtctcagtagtaccctgacgctgtccaaagcagactacgagaaacacaaagtctacgcctgcgaagtcacccatcagggcctgtcctcgcccgtcacaaagtccttcaacaggggagagtgttga

SEQ ID NO: 55 - protein, 5 aa, Oryctolagus Cuniculus
SYDIS

SEQ ID NO: 56 - protein, 5 aa, artificial sequence
  synthetic humanized sequence-MS103205H001 etc.  HVR-H1
HYDIS

SEQ ID NO: 57 - protein, 5 aa, artificial sequence
  synthetic humanized sequence-MS1032LO01 etc.  HVR-H1
HTDIS

SEQ ID NO: 58 - protein, 16 aa, Oryctolagus Cuniculus
IISYAGSTYYASWAKG

SEQ ID NO: 59 - protein, 16 aa, artificial sequence
  synthetic humanized sequence-MS103205H009 etc.  HVR-H2
IISHAGSTYYASWAKG

SEQ ID NO: 60 - protein, 16 aa, artificial sequence
  synthetic humanized sequence-MS1032LO02, 03 HVR-H2
IISYAGSTYYMSWAKG

SEQ ID NO: 61 - protein, 11 aa, Oryctolagus Cuniculus
GVPAYSTGGDL

SEQ ID NO: 62 - protein, 11 aa, artificial sequence
  synthetic humanized sequence-MS103205H026 etc.  HVR-H3
GVPAHSTGGDL

SEQ ID NO: 63 - protein, 11 aa, artificial sequence
  synthetic humanized sequence-MS103205H028 etc.  HVR-H3
GVPAYSHGGDL

SEQ ID NO: 64 - protein, 11 aa, artificial sequence
  synthetic humanized sequence-MS103205H709 etc.  HVR-H3
GVPAHSHGGDL

SEQ ID NO: 65 - protein, 13 aa, Oryctolagus Cuniculus
QSSQSVYDNNWLS

SEQ ID NO: 66 - protein, 13 aa, artificial sequence
  synthetic humanized sequence-M103202L008 etc.  HVR-L1
QSSQSVYHNNWLS

SEQ ID NO: 67 - protein, 13 aa, artificial sequence
  synthetic humanized sequence-MS1032LO01 HVR-L1
TSSQSVYHNNWLS

SEQ ID NO: 68 - protein, 13 aa, artificial sequence
  synthetic humanized sequence-MS1032LO03 HVR-L1
QTSQSVYHDNWLS

SEQ ID NO: 69 - protein, 13 aa, artificial sequence
  synthetic humanized sequence-MS1032LO04 HVR-L1
TSSQSVYHDNWLS

SEQ ID NO: 70 - protein, 7 aa, artificial sequence
  synthetic humanized sequence-MST1032 etc.  HVR-L2
WASTLAS

SEQ ID NO: 71 - protein, 7 aa, artificial sequence
  synthetic humanized sequence-MS1032LO01 etc.  HVR-L2
WASTLAY

SEQ ID NO: 72 - protein, 7 aa, artificial sequence
  synthetic humanized sequence-MS1032LO02 HVR-L2
WASTLAF

SEQ ID NO: 73 - protein, 10 aa, Oryctolagus Cuniculus
AGGYGGGLYA

SEQ ID NO: 74 - protein, 10 aa, artificial sequence
  synthetic humanized sequence-MS1032LO01 etc.  HVR-L3
AGGYGGGRYA

SEQ ID NO: 75 - protein, 242 aa, Homo sapiens
ENSEQKENVEKEGLCNACTWRQNTKSSRIEAIKIQILSKLRLETAPNISKDVIRQLLPKAPPLRELIDQYDVQRDDSSDGSLEDDDYHATTETIITMPTESDFLMQVDGKPKCCFFKFSSKIQYNKVVKAQLWIYLRPVETPTTVFVQILRLIKPMKDGTRYTGIRSLKLDMNPGTGIWQSIDVKTVLQNWLKQPESNLGIEIKALDENGHDLAVTFPGPGEDGLNPFLEVKVTDTPKRSRR

SEQ ID NO: 76 - protein, 242 aa, Homo sapiens
ENSEQKENVEKEGLCNACTWRQNTKSSRIEAIKIQILSKLRLETAPNISKDAIRQLLPKAPPLRELIDQYDVQRDDSSDGSLEDDDYHATTETIITMPTESDFLMQVDGKPKCCFFKFSSKIQYNKVVKAQLWIYLRPVETPTTVFVQILRLIKPMKDGTRYTGIRSLKLDMNPGTGIWQSIDVKTVLQNWLKQPESNLGIEIKALDENGHDLAVTFPGPGEDGLNPFLEVKVTDTPKRSRR

SEQ ID NO: 77 - protein, 242 aa, Homo sapiens
EGSEREENVEKEGLCNACAWRQNTRYSRIEAIKIQILSKLRLETAPNISKDAIRQLLPRAPPLRELIDQYDVQRDDSSDGSLEDDDYHATTETIITMPTESDFLMQADGKPKCCFFKFSSKIQYNKVVKAQLWIYLRPVKTPTTVFVQILRLIKPMKDGTRYTGIRSLKLDMSPGTGIWQSIDVKTVLQNWLKQPESNLGIEIKALDENGHDLAVTFPGPGEDGLNPFLEVKVTDTPKRSRR

SEQ ID NO: 78 - protein, 266 aa, Homo sapiens
MQKLQLCVYIYLFMLIVAGPVDLNENSEQKENVEKEGLCNACTWRQNTKSSRIEAIKIQILSKLRLETAPNISKDVIRQLLPKAPPLRELIDQYDVQRDDSSDGSLEDDDYHATTETIITMPTESDFLMQVDGKPKCCFFKFSSKIQYNKVVKAQLWIYLRPVETPTTVFVQILRLIKPMKDGTRYTGIRSLKLDMNPGTGIWQSIDVKTVLQNWLKQPESNLGIEIKALDENGHDLAVTFPGPGEDGLNPFLEVKVTDTPKRSRR

SEQ ID NO: 79 - protein, 266 aa, artificial sequence
  cynomolgous monkey myostatin (propeptide)
MQKLQLCVYIYLFMLIVAGPVDLNENSEQKENVEKEGLCNACTWRQNTKSSRIEAIKIQILSKLRLETAPNISKDAIRQLLPKAPPLRELIDQYDVQRDDSSDGSLEDDDYHATTETIITMPTESDFLMQVDGKPKCCFFKFSSKIQYNKVVKAQLWIYLRPVETPTTVFVQILRLIKPMKDGTRYTGIRSLKLDMNPGTGIWQSIDVKTVLQNWLKQPESNLGIEIKALDENGHDLAVTFPGPGEDGLNPFLEVKVTDTPKRSRR

SEQ ID NO: 80 - protein, 267 aa, mus musculus
MMQKLQMYVYIYLFMLIAAGPVDLNEGSEREENVEKEGLCNACAWRQNTRYSRIEAIKIQILSKLRLETAPNISKDAIRQLLPRAPPLRELIDQYDVQRDDSSDGSLEDDDYHATTETIITMPTESDFLMQADGKPKCCFFKFSSKIQYNKVVKAQLWIYLRPVKTPTTVFVQILRLIKPMKDGTRYTGIRSLKLDMSPGTGIWQSIDVKTVLQNWLKQPESNLGIEIKALDENGHDLAVTFPGPGEDGLNPFLEVKVTDTPKRSRR

SEQ ID NO: 81 - protein, 407 aa, Homo sapiens
MVLAAPLLLGFLLLALELRPRGEAAEGPAAAAAAAAAAAAAGVGGERSSRPAPSVAPEPDGCPVCVWRQHSRELRLESIKSQILSKLRLKEAPNISREVVKQLLPKAPPLQQILDLHDFQGDALQPEDFLEEDEYHATTETVISMAQETDPAVQTDGSPLCCHFHFSPKVMFTKVLKAQLWVYLRPVPRPATVYLQILRLKPLTGEGTAGGGGGGRRHIRIRSLKIELHSRSGHWQSIDFKQVLHSWFRQPQSNWGIEINAFDPSGTDLAVTSLGPGAEGLHPFMELRVLENTKRSRRNLGLDCDEHSSESRCCRYPLTVDFEAFGWDWIIAPKRYKANYCSGQCEYMFMQKYPHTHLVQQANPRGSAGPCCTPTKMSPINMLYFNDKQQIIYGKIPGMVVDRCGCS

SEQ ID NO: 82 - protein, 109 aa, Homo sapiens
NLGLDCDEHSSESRCCRYPLTVDFEAFGWDWIIAPKRYKANYCSGQCEYMFMQKYPHTHLVQQANPRGSAGPCCTPTKMSPINMLYFNDKQQIIYGKIPGMVVDRCGCS

SEQ ID NO: 83 - protein, 274 aa, Homo sapiens
AEGPAAAAAAAAAAAAAGVGGERSSRPAPSVAPEPDGCPVCVWRQHSRELRLESIKSQILSKLRLKEAPNISREVVKQLLPKAPPLQQILDLHDFQGDALQPEDFLEEDEYHATTETVISMAQETDPAVQTDGSPLCCHFHFSPKVMFTKVLKAQLWVYLRPVPRPATVYLQILRLKPLTGEGTAGGGGGGRRHIRIRSLKIELHSRSGHWQSIDFKQVLHSWFRQPQSNWGIEINAFDPSGTDLAVTSLGPGAEGLHPFMELRVLENTKRSRR

SEQ ID NO: 84 - protein, 298 aa, Homo sapiens
MVLAAPLLLGFLLLALELRPRGEAAEGPAAAAAAAAAAAAAGVGGERSSRPAPSVAPEPDGCPVCVWRQHSRELRLESIKSQILSKLRLKEAPNISREVVKQLLPKAPPLQQILDLHDFQGDALQPEDFLEEDEYHATTETVISMAQETDPAVQTDGSPLCCHFHFSPKVMFTKVLKAQLWVYLRPVPRPATVYLQILRLKPLTGEGTAGGGGGGRRHIRIRSLKIELHSRSGHWQSIDFKQVLHSWFRQPQSNWGIEINAFDPSGTDLAVTSLGPGAEGLHPFMELRVLENTKRSRR

SEQ ID NO: 85 - protein, 409 aa, Homo sapiens
MKWVTFLLLLFISGSAFSDYKDDDDKAEGPAAAAAAAAAAAAAGVGGERSSRPAPSVAPEPDGCPVCVWRQHSRELRLESIKSQILSKLRLKEAPNISREVVKQLLPKAPPLQQILDLHDFQGDALQPEDFLEEDEYHATTETVISMAQETDPAVQTDGSPLCCHFHFSPKVMFTKVLKAQLWVYLRPVPRPATVYLQILRLKPLTGEGTAGGGGGGRRHIRIRSLKIELHSRSGHWQSIDFKQVLHSWFRQPQSNWGIEINAFDPSGTDLAVTSLGPGAEGLHPFMELRVLENTKRSRRNLGLDCDEHSSESRCCRYPLTVDFEAFGWDWIIAPKRYKANYCSGQCEYMFMQKYPHTHLVQQANPRGSAGPCCTPTKMSPINMLYFNDKQQIIYGKIPGMVVDRCGCS

SEQ ID NO: 86 - protein, 119 aa, artificial sequence
  synthetic humanized sequence-MS1032LO06, 24 VH
QVTLKESGPVLVKPTETLTLTCTVSGIDLSHDDISWVRQAPGKGLEWVGIISYAGSTYYASWAKGRLTISKDTSKNQVVLTMTNMDPVDTATYYCARGVPAYSHGGDLWGQGTLVTVSS

SEQ ID NO: 87 - protein, 119 aa, artificial sequence
  synthetic humanized sequence-MS1032LO07 VH
QVTLKESGPVLVKPTETLTLTCTVSGIDLSHDDISWVRQAPGKGLEWVGIISYAGSMYYASWAKGRLTISKDTSKNQVVLTMTNMDPVDTATYYCARGVPAYSHGGDKWGQGTLVTVSS

SEQ ID NO: 88 - protein, 119 aa, artificial sequence
  synthetic humanized sequence-MS1032LO10 VH
QVTLKESGPVLVKPTETLTLTCTVSGIDLSHTDISWVRQAPGKGLEWVGIISYAGKTYYASWAKKRLTISKDTSKNQVVLTMTNMDPVDTATYYCARGVPAYSHGGDLWGQGTLVTVSS

SEQ ID NO: 89 - protein, 119 aa, artificial sequence
  synthetic humanized sequence-MS1032LO11 VH
QVTLKESGPVLVKPTETLTLTCTVSGIDLSHTDISWVRQAPGKGLEWVGIISYAGKKYYASWAKGRLTISKDTSKNQVVLTMTNMDPVDTATYYCARGVPAYSHGGDLWGQGTLVTVSS

SEQ ID NO: 90 - protein, 119 aa, artificial sequence
  synthetic humanized sequence-MS1032LO12 VH
QVTLKESGPVLVKPTETLTLTCTVSGIDLSHTDISWVRQAPGKGLEWVGIISYAGSKYKASWAKGRLTISKDTSKNQVVLTMTNMDPVDTATYYCARGVPAYSHGGDLWGQGTLVTVSS

SEQ ID NO: 91 - protein, 119 aa, artificial sequence
  synthetic humanized sequence-MS1032LO18 VH
QVTLKESGPVLVKPTETLTLTCTVSGIDLSHDDISWVRQAPGKGLEWVGIISYAGKKYYASWAKGRLTISKDTSKNQVVLTMTNMDPVDTATYYCARGVPAYSHGGDLWGQGTLVTVSS

SEQ ID NO: 92 - protein, 119 aa, artificial sequence
  synthetic humanized sequence-MS1032LO19, 26 VH
QVQLVESGGGLVQPGGSLRLSCAVSGIDLSHDDISWVRQAPGKGLEWVSIISYAGSTYYASWAKGRLTISKDTSKNQVVLTMTNMDPVDTATYYCARGVPAYSHGGDLWGQGTLVTVSS

SEQ ID NO: 93 - protein, 119 aa, artificial sequence
  synthetic humanized sequence-MS1032LO21 VH
QVTLKESGPVLVKPTETLTLTCKVSGIDLSHDDISWVRQAPGKGLEWVSIISYAGSTYYASWAKGRLTISKDTSKNQVVLTMTNMDPVDTATYYCARGVPAYSHGGDLWGQGTLVTVSS

SEQ ID NO: 94 - protein, 119 aa, artificial sequence
  synthetic humanized sequence-MS1032LO23 VH
QVTLKESGPVLVKPTETLTLTCKVSGIDLSHEDISWVRQAPGKGLEWVSIISYAGSTYYASWAKGRLTISKDTSKNQVVLTMTNMDPVDTATYYCARGVPAYSHGGDLWGQGTLVTVSS

SEQ ID NO: 95 - protein, 119 aa, artificial sequence
  synthetic humanized sequence-MS1032LO25 VH
QVQLVESGGGLVQPGGSLRLSCAVSGIDLSHEDISWVRQAPGKGLEWVSIISYAGSKYYASWAKGRLTISKDTSKNQVVLTMTNMDPVDTATYYCARGVPAYSHGGDLWGQGTLVTVSS

SEQ ID NO: 96 - protein, 110 aa, artificial sequence
  synthetic humanized sequence-MS1032LO06, 07, 10, 11, 12, 18,  VL
DIVMTQSPATLSLSPGERATLSCTSSQSVYHANWLSWFQQKPGQPPKLLIYWASTLAYGVPSRFSGSGSGTDFTLTISSLQPEDAATYYCAGGYGGGRYAFGQGTKVEIK

SEQ ID NO: 97 - protein, 110 aa, artificial sequence
  synthetic humanized sequence-MS1032LO19, 21, 23, 25 VL
DIVMTQSPATLSLSPGERATLSCTTSQSVYHENWLSWFQQKPGQPPKLLIYWASTLAYGVPSRFSGSGSGTDFTLTISSLQPEDAATYYCAGGYGGGRYAFGQGTKVEIK

SEQ ID NO: 98 - protein, 110 aa, artificial sequence
  synthetic humanized sequence-MS1032LO24 VL
DIVMTQSPATLSLSPGERATLSCTSSQSVFHENWLSWFQQKPGQPPKLLIYWASTLAWGVPSRFSGSGSGTDFTLTISSLQPEDAATYYCAGGYGGGRYAFGQGTKVEIK

SEQ ID NO: 99 - protein, 110 aa, artificial sequence
  synthetic humanized sequence-MS1032LO26 VL
DIVMTQSPATLSLSPGERATLSCTTSQSVYHENWLSWYQQKPGQPPKLLIYWASTLAYGVPSRFSGSGSGTDFTLTISSLQPEDVATYYCAGGYGGGRYAFGQGTKVEIK

SEQ ID NO: 100 - DNA, 357 bp, artificial sequence
  synthetic humanized sequence-MS1032LO06, 24 VH
caggtgacactgaaagaaagcggccccgtgctggtgaagccaaccgagacactgactctgacctgcacagtgagtgggatcgacctgagccacgacgacatctcctgggtgcggcaggcacccggaaagggcctggaatgggtcggcatcattagctacgccgggagcacatactatgccagctgggctaaaggaagactgactatctccaaggacacctctaaaaaccaggtggtcctgactatgaccaatatggaccccgtggatacagcaacttactattgtgccaggggcgtccctgcttactctcacggaggggatctgtggggacagggaaccctggtgacagtctctagt

SEQ ID NO: 101 - DNA, 357 bp, artificial sequence
  synthetic humanized sequence-MS1032LO07 VH
caggtgacactgaaagaaagcggccccgtgctggtgaagccaaccgagacactgactctgacctgcacagtgagtgggatcgacctgagccacgacgacatctcctgggtgcggcaggcacccggaaagggcctggaatgggtcggcatcattagctacgccgggagcatgtactatgccagctgggctaaaggaagactgactatctccaaggacacctctaaaaaccaggtggtcctgactatgaccaatatggaccccgtggatacagcaacttactattgtgccaggggcgtccctgcttactctcacggaggggataagtggggacagggaaccctggtgacagtctctagt

SEQ ID NO: 102 - DNA, 357 bp, artificial sequence
  synthetic humanized sequence-MS1032LO10 VH
caggtgacactgaaagaaagcggccccgtgctggtgaagccaaccgagacactgactctgacctgcacagtgagtgggatcgacctgagccacaccgacatctcctgggtgcggcaggcacccggaaagggcctggaatgggtcggcatcattagctacgccgggaagacatactatgccagctgggctaaaaaaagactgactatctccaaggacacctctaaaaaccaggtggtcctgactatgaccaatatggaccccgtggatacagcaacttactattgtgccaggggcgtccctgcttactctcacggaggggatctgtggggacagggaaccctggtgacagtctctagt

SEQ ID NO: 103 - DNA, 357 bp, artificial sequence
  synthetic humanized sequence-MS1032LO11 VH
caggtgacactgaaagaaagcggccccgtgctggtgaagccaaccgagacactgactctgacctgcacagtgagtgggatcgacctgagccacaccgacatctcctgggtgcggcaggcacccggaaagggcctggaatgggtcggcatcattagctacgccgggaagaaatactatgccagctgggctaaaggaagactgactatctccaaggacacctctaaaaaccaggtggtcctgactatgaccaatatggaccccgtggatacagcaacttactattgtgccaggggcgtccctgcttactctcacggaggggatctgtggggacagggaaccctggtgacagtctctagt

SEQ ID NO: 104 - DNA, 357 bp, artificial sequence
  synthetic humanized sequence-MS1032LO12 VH
caggtgacactgaaagaaagcggccccgtgctggtgaagccaaccgagacactgactctgacctgcacagtgagtgggatcgacctgagccacaccgacatctcctgggtgcggcaggcacccggaaagggcctggaatgggtcggcatcattagctacgccgggagcaaatacaaggccagctgggctaaaggaagactgactatctccaaggacacctctaaaaaccaggtggtcctgactatgaccaatatggaccccgtggatacagcaacttactattgtgccaggggcgtccctgcttactctcacggaggggatctgtggggacagggaaccctggtgacagtctctagt

SEQ ID NO: 105 - DNA, 357 bp, artificial sequence
  synthetic humanized sequence-MS1032LO18 VH
caggtgacactgaaagaaagcggccccgtgctggtgaagccaaccgagacactgactctgacctgcacagtgagtgggatcgacctgagccacgacgacatctcctgggtgcggcaggcacccggaaagggcctggaatgggtcggcatcattagctacgccgggaagaaatactatgccagctgggctaaaggaagactgactatctccaaggacacctctaaaaaccaggtggtcctgactatgaccaatatggaccccgtggatacagcaacttactattgtgccaggggcgtccctgcttactctcacggaggggatctgtggggacagggaaccctggtgacagtctctagt

SEQ ID NO: 106 - DNA, 357 bp, artificial sequence
  synthetic humanized sequence-MS1032LO19, 26 VH
caggtgcagctggtcgaatctggaggaggactggtgcagccaggagggtcactgcgactgagctgtgccgtgtccgggatcgacctgtcacacgacgatattagctgggtgagacaggcacccgggaagggactggaatgggtctctatcattagttacgccggcagcacctactatgcctcttgggctaaaggcaggctgaccatttctaaggacacaagtaaaaaccaggtggtcctgaccatgacaaatatggaccccgtggatactgcaacctactattgcgcccggggcgtccctgcttatagccacggcggcgatctgtggggacaggggacactggtgactgtcagctcc

SEQ ID NO: 107 - DNA, 357 bp, artificial sequence
  synthetic humanized sequence-MS1032LO21 VH
caggtgacactgaaagaaagcggccccgtgctggtgaagccaaccgagacactgactctgacctgcaaagtgagtgggatcgacctgagccacgacgacatctcctgggtgcggcaggcacccggaaagggcctggaatgggtctccatcattagctacgccgggagcacatactatgccagctgggctaaaggaagactgactatctccaaggacacctctaaaaaccaggtggtcctgactatgaccaatatggaccccgtggatacagcaacttactattgtgccaggggcgtccctgcttactctcacggaggggatctgtggggacagggaaccctggtgacagtctctagt

SEQ ID NO: 108 - DNA, 357 bp, artificial sequence
  synthetic humanized sequence-MS1032LO23 VH
caggtgacactgaaagaaagcggccccgtgctggtgaagccaaccgagacactgactctgacctgcaaagtgagtgggatcgacctgagccacgaggacatctcctgggtgcggcaggcacccggaaagggcctggaatgggtctccatcattagctacgccgggagcacatactatgccagctgggctaaaggaagactgactatctccaaggacacctctaaaaaccaggtggtcctgactatgaccaatatggaccccgtggatacagcaacttactattgtgccaggggcgtccctgcttactctcacggaggggatctgtggggacagggaaccctggtgacagtctctagt

SEQ ID NO: 109 - DNA, 357 bp, artificial sequence
  synthetic humanized sequence-MS1032LO25 VH
caggtgcagctggtcgaatctggaggaggactggtgcagccaggagggtcactgcgactgagctgtgccgtgtccgggatcgacctgtcacacgaggatattagctgggtgagacaggcacccgggaagggactggaatgggtctctatcattagttacgccggcagcaagtactatgcctcttgggctaaaggcaggctgaccatttctaaggacacaagtaaaaaccaggtggtcctgaccatgacaaatatggaccccgtggatactgcaacctactattgcgcccggggcgtccctgcttatagccacggcggcgatctgtggggacaggggacactggtgactgtcagctcc

SEQ ID NO: 110 - DNA, 330 bp, artificial sequence
  synthetic humanized sequence-MS1032LO06, 07, 10, 11, 12, 18,  VL
gacattgtgatgactcagtctcctgccactctgtcactgagccctggcgagcgagcaaccctgtcttgcaccagcagccagtccgtgtaccacgccaattggctgagctggttccagcagaagccagggcagccccctaaactgctgatctattgggcatcaacactggcctacggcgtcccctccagattctccggatctggcagtgggactgactttaccctgaccatcagcagcctccagcccgaggatgccgctacctactattgtgctggcgggtacggaggcgggcggtatgcatttggacagggcacaaaggtggaaatcaaa

SEQ ID NO: 111 - DNA, 330 bp, artificial sequence
  synthetic humanized sequence-MS1032LO19, 21, 23, 25 VL
gacattgtgatgactcagtctcctgccactctgtcactgagccctggcgagcgagcaaccctgtcttgcaccaccagccagtccgtgtaccacgagaattggctgagctggttccagcagaagccagggcagccccctaaactgctgatctattgggcatcaacactggcctacggcgtcccctccagattctccggatctggcagtgggactgactttaccctgaccatcagcagcctccagcccgaggatgccgctacctactattgtgctggcgggtacggaggcgggcggtatgcatttggacagggcacaaaggtggaaatcaaa

SEQ ID NO: 112 - DNA, 330 bp, artificial sequence
  synthetic humanized sequence-MS1032LO24 VL
gacattgtgatgactcagtctcctgccactctgtcactgagccctggcgagcgagcaaccctgtcttgcaccagcagccagtccgtgttccacgagaattggctgagctggttccagcagaagccagggcagccccctaaactgctgatctattgggcatcaacactggcctggggcgtcccctccagattctccggatctggcagtgggactgactttaccctgaccatcagcagcctccagcccgaggatgccgctacctactattgtgctggcgggtacggaggcgggcggtatgcatttggacagggcacaaaggtggaaatcaaa

SEQ ID NO: 113 - DNA, 330 bp, artificial sequence
  synthetic humanized sequence-MS1032LO26 VL
gacattgtgatgactcagtctcctgccactctgtcactgagccctggcgagcgagcaaccctgtcttgcaccaccagccagtccgtgtaccacgagaattggctgagctggtaccagcagaagccagggcagccccctaaactgctgatctattgggcatcaacactggcctacggcgtcccctccagattctccggatctggcagtgggactgactttaccctgaccatcagcagcctccagcccgaggatgtcgctacctactattgtgctggcgggtacggaggcgggcggtatgcatttggacagggcacaaaggtggaaatcaaa

SEQ ID NO: 114 - protein, 5 aa, artificial sequence
  synthetic humanized sequence-MS1032LO06, 07, 18, 19, 21, 24, 26 HVR-H1
HDDIS

SEQ ID NO: 115 - protein, 5 aa, artificial sequence
  synthetic humanized sequence-MS1032LO23, 25 HVR-H1
HEDIS

SEQ ID NO: 116 - protein, 16 aa, artificial sequence
  synthetic humanized sequence-MS1032LO07 HVR-H2
IISYAGSMYYASWAKG

SEQ ID NO: 117 - protein, 16 aa, artificial sequence
  synthetic humanized sequence-MS1032LO10 HVR-H2
IISYAGKTYYASWAKK

SEQ ID NO: 118 - protein, 16 aa, artificial sequence
  synthetic humanized sequence-MS1032LO11, 18 HVR-H2
IISYAGKKYYASWAKG

SEQ ID NO: 119 - protein, 16 aa, artificial sequence
  synthetic humanized sequence-MS1032LO12 HVR-H2
IISYAGSKYKASWAKG

SEQ ID NO: 120 - protein, 16 aa, artificial sequence
  synthetic humanized sequence-MS1032LO25 HVR-H2
IISYAGSKYYASWAKG

SEQ ID NO: 121 - protein, 11 aa, artificial sequence
  synthetic humanized sequence-MS1032LO07 HVR-H3
GVPAYSHGGDK

SEQ ID NO: 122 - protein, 13 aa, artificial sequence
  synthetic humanized sequence-MS1032LO06, 07, 10, 11, 12, 18 HVR-L1
TSSQSVYHANWLS

SEQ ID NO: 123 - protein, 13 aa, artificial sequence
  synthetic humanized sequence-MS1032LO19, 21, 23, 25, 26 HVR-L1
TTSQSVYHENWLS

SEQ ID NO: 124 - protein, 13 aa, artificial sequence
  synthetic humanized sequence-MS1032LO24 HVR-L1
TSSQSVFHENWLS

SEQ ID NO: 125 - protein, 7 aa, artificial sequence
  synthetic humanized sequence-MS1032LO24 HVR-L2
WASTLAW

SEQ ID NO: 126 - protein, 5 aa, artificial sequence
  synthetic humanized sequence-1032LOxx HVR-H1
  MISC_FEATURE (1)..(1): Xaa can be Ser or His
  MISC_FEATURE (2)..(2): Xaa can be Tyr, Thr, Asp, or Glu
XXDIS

SEQ ID NO: 127 - protein, 16 aa, artificial sequence
  synthetic humanized sequence-1032LOxx HVR-H2
  MISC_FEATURE (4)..(4): Xaa can be Tyr or His
  MISC_FEATURE (7)..(7): Xaa can be Ser or Lys
  MISC_FEATURE (8)..(8): Xaa can be Thr, Met, or Lys
  MISC_FEATURE (10)..(10): Xaa can be Tyr or Lys
  MISC_FEATURE (11)..(11): Xaa can be Ala, Met or Glu
  MISC_FEATURE (12)..(12): Xaa can be Ser or Glu
  MISC_FEATURE (16)..(16): Xaa can be Gly or Lys
IISXAGXXYXXXWAKX

SEQ ID NO: 128 - protein, 11 aa, artificial sequence
  synthetic humanized sequence-1032LOxx HVR-H3
  MISC_FEATURE (5)..(5): Xaa can be Tyr or His
  MISC_FEATURE (7)..(7): Xaa can be Thr or His
  MISC_FEATURE (11)..(11): Xaa can be Leu or Lys
GVPAXSXGGDX

SEQ ID NO: 129 - protein, 13 aa, artificial sequence
  synthetic humanized sequence-1032LOxx HVR-L1
  MISC_FEATURE (1)..(1): Xaa can be Gln or Thr
  MISC_FEATURE (2)..(2): Xaa can be Ser or Thr
  MISC_FEATURE (5)..(5): Xaa can be Ser or Glu
  MISC_FEATURE (7)..(7): Xaa can be Tyr or Phe
  MISC_FEATURE (8)..(8): Xaa can be Asp or His
  MISC_FEATURE (9)..(9): Xaa can be Asn, Asp, Ala, or Glu
XXSQXVXXXNWLS

SEQ ID NO: 130 - protein, 7 aa, artificial sequence
  synthetic humanized sequence-1032LOxx HVR-L2
  MISC_FEATURE (3)..(3): Xaa can be Ser or Glu
  MISC_FEATURE (7)..(7): Xaa can be Ser, Tyr, Phe, or Trp
WAXTLAX

SEQ ID NO: 131 - protein, 10 aa, artificial sequence
  synthetic humanized sequence-1032LOxx HVR-L3
  MISC_FEATURE (8)..(8): Xaa can be Leu or Arg
AGGYGGGXYA

SEQ ID NO: 132 - protein, 30 aa, Homo sapiens
QVTLKESGPVLVKPTETLTLTCTVSGIDLS

SEQ ID NO: 133 - protein, 30 aa, Homo sapiens
QVQLVESGGGLVQPGGSLRLSCAVSGIDLS

SEQ ID NO: 134 - protein, 30 aa, Homo sapiens
QVTLKESGPVLVKPTETLTLTCKVSGIDLS

SEQ ID NO: 135 - protein, 14 aa, Homo sapiens
WVRQAPGKGLEWVG

SEQ ID NO: 136 - protein, 14 aa, Homo sapiens
WVRQAPGKGLEWVS

SEQ ID NO: 137 - protein, 32 aa, Homo sapiens
RLTISKDTSKNQVVLTMTNMDPVDTATYYCAR

SEQ ID NO: 138 - protein, 11 aa, Homo sapiens
WGQGTLVTVSS

SEQ ID NO: 139 - protein, 23 aa, Homo sapiens
DIVMTQSPATLSLSPGERATLSC

SEQ ID NO: 140 - protein, 15 aa, Homo sapiens
WFQQKPGQPPKLLIY

SEQ ID NO: 141 - protein, 15 aa, Homo sapiens
WYQQKPGQPPKLLIY

SEQ ID NO: 142 - protein, 32 aa, Homo sapiens
GVPSRFSGSGSGTDFTLTISSLQPEDAATYYC

SEQ ID NO: 143 - protein, 32 aa, Homo sapiens
GVPSRFSGSGSGTDFTLTISSLQPEDVATYYC

SEQ ID NO: 144 - protein, 10 aa, Homo sapiens
FGQGTKVEIK

SEQ ID NO: 145 - protein, 121 aa, Oryctolagus Cuniculus
QSVEESGGRLVTPGTPLTLTCTVSGFSLSRYYVSWVRQAPGKGLEWIGIIYTGGNTNYASWAKGRFTISKASTTVDLKMTGPTTEDTATYFCAGFLDYSHYTTGGYYLDLWGPGTLVTVSS

SEQ ID NO: 146 - protein, 119 aa, Oryctolagus Cuniculus
QSLEESGGGLVKPGGTLTLTCKASGIDFSSYYYMCWVRQAPGKGLEWIACIYAGISGSTYYASWAKGRFTISKTSSTTVTLQMTSLTAADTATYFCARDPYHFDYGSLWGPGTLVTVSS

SEQ ID NO: 147 - protein, 116 aa, Oryctolagus Cuniculus
QSLEESGGRLVTPGTPLTLTCTVSGIDLSRYWMSWVRQAPGKGLEWIGIISSGGTTYYASWAKGRFTISKTSTTVDLKITSPTTEDTATYFCARDSRYGAARLDLWGQGTLVTVSS

SEQ ID NO: 148 - protein, 109 aa, Oryctolagus Cuniculus
QSVEESGGRLVTPGTPLTLTCTVSGFSLSSYIMGWVRQAPGKGLEWIGFIYVSGSTYYASWAKGRFTISRTSTTVDLRITSPTTEDTATYFCVRTWDLWGPGTLVTVSS

SEQ ID NO: 149 - protein, 115 aa, Oryctolagus Cuniculus
QSVEESGGRLVTPGTPLTLTCTVSGFSLSSYAMSWVRQAPGKGLEWIGIIYGVGSTYYASWAKGRFTISKTSTTVDLKIASPTTEDTATYFCARDDYGWGYTNLWGPGTLVTVSS

SEQ ID NO: 150 - protein, 117 aa, Oryctolagus Cuniculus
QSVEESGGRLVTPGTPLTLTCTVSGIDLSSSSMIWVRQAPGEGLKYIGFISKSGYTYYASWAKGRFTISKTSTTVDLKITSPTTEDTATYFCARGGYSGDWDYFTLWGPGTLVTVSS

SEQ ID NO: 151 - protein, 112 aa, Oryctolagus Cuniculus
QVLTQTPSPVSAAVGGTVTINCQASQSVYNNKNLAWYQQKPGQPPKLLIYYASTLPSGVSSRFKGSGSGTQFTLTISGVQCDDAATYYCQGEFSCGSADCTAFGGGTKVEIK

SEQ ID NO: 152 - protein, 112 aa, Oryctolagus Cuniculus
ALVMTQTPASVSAAVGGTVTINCQASQSVYGGNELSWYQQEPGQPPKLLIYSASKLASGVPSRFKGSGSGTQFTLTISGVQCDDAAAYYCAGYRTYSDDDNAFGGGTKVEIK

SEQ ID NO: 153 - protein, 112 aa, Oryctolagus Cuniculus
QVLTQTPASVSAAVGGTVTINCQSSQSVAGNDNLAWYQQKPGQPPKLLIYYASNLASGVSSRFKGSGSGTRFTLTISDVQCDDAATYYCLGNYDCSSADCDAFGGGTKVEIK

SEQ ID NO: 154 - protein, 109 aa, Oryctolagus Cuniculus
QVLTQTPSSTSAAVGGTVTINCQSSQSVYDNNWLAWYQQKPGQPPKRLIYGASTLDSGVPSRFKGSGSGTEFTLTISDLECDDAATYYCQGGYSGNIYPFGGGTKVEIK

SEQ ID NO: 155 - protein, 111 aa, Oryctolagus Cuniculus
QVLTQTPSSVSAAVGGTVTINCQSSQSVYNNNYLAWFQQKPGQPPKLLIYDASKLASGVPSRFKGSGSGTQFTLTISGVQCDDAATYYCQGSYYSSGWYRAFGGGTKVEIK

SEQ ID NO: 156 - protein, 114 aa, Oryctolagus Cuniculus
ADIVMTQTPASVEAAVGGTVTIKCQASESIGNALAWYQQKPGQPPKLLIYGAFNLESGVPSRFRGSGSGTEYTLTISDLECDDAATYYCQGYFWSSSTIYAFWAFGGGTKVEIK

SEQ ID NO: 157 - protein, 5 aa, Oryctolagus Cuniculus
RYYVS

SEQ ID NO: 158 - protein, 6 aa, Oryctolagus Cuniculus
SYYYMC

SEQ ID NO: 159 - protein, 5 aa, Oryctolagus Cuniculus
RYWMS

SEQ ID NO: 160 - protein, 5 aa, Oryctolagus Cuniculus
SYIMG

SEQ ID NO: 161 - protein, 5 aa, Oryctolagus Cuniculus
SYAMS

SEQ ID NO: 162 - protein, 5 aa, Oryctolagus Cuniculus
SSSMI

SEQ ID NO: 163 - protein, 16 aa, Oryctolagus Cuniculus
IIYTGGNTNYASWAKG

SEQ ID NO: 164 - protein, 18 aa, Oryctolagus Cuniculus
CIYAGISGSTYYASWAKG

SEQ ID NO: 165 - protein, 16 aa, Oryctolagus Cuniculus
IISSGGTTYYASWAKG

SEQ ID NO: 166 - protein, 16 aa, Oryctolagus Cuniculus
FIYVSGSTYYASWAKG

SEQ ID NO: 167 - protein, 16 aa, Oryctolagus Cuniculus
IIYGVGSTYYASWAKG

SEQ ID NO: 168 - protein, 16 aa, Oryctolagus Cuniculus
FISKSGYTYYASWAKG

SEQ ID NO: 169 - protein, 16 aa, Oryctolagus Cuniculus
FLDYSHYTTGGYYLDL

SEQ ID NO: 170 - protein, 10 aa, Oryctolagus Cuniculus
DPYHFDYGSL

SEQ ID NO: 171 - protein, 11 aa, Oryctolagus Cuniculus
DSRYGAARLDL

SEQ ID NO: 172 - protein, 4 aa, Oryctolagus Cuniculus
TWDL

SEQ ID NO: 173 - protein, 10 aa, Oryctolagus Cuniculus
DDYGWGYTNL

SEQ ID NO: 174 - protein, 12 aa, Oryctolagus Cuniculus
GGYSGDWDYFTL

SEQ ID NO: 175 - protein, 13 aa, Oryctolagus Cuniculus
QASQSVYNNKNLA

SEQ ID NO: 176 - protein, 13 aa, Oryctolagus Cuniculus
QASQSVYGGNELS

SEQ ID NO: 177 - protein, 13 aa, Oryctolagus Cuniculus
QSSQSVAGNDNLA

SEQ ID NO: 178 - protein, 13 aa, Oryctolagus Cuniculus
QSSQSVYDNNWLA

SEQ ID NO: 179 - protein, 13 aa, Oryctolagus Cuniculus
QSSQSVYNNNYLA

SEQ ID NO: 180 - protein, 11 aa, Oryctolagus Cuniculus
QASESIGNALA

SEQ ID NO: 181 - protein, 7 aa, Oryctolagus Cuniculus
YASTLPS

SEQ ID NO: 182 - protein, 7 aa, Oryctolagus Cuniculus
SASKLAS

SEQ ID NO: 183 - protein, 7 aa, Oryctolagus Cuniculus
YASNLAS

SEQ ID NO: 184 - protein, 7 aa, Oryctolagus Cuniculus
GASTLDS

SEQ ID NO: 185 - protein, 7 aa, Oryctolagus Cuniculus
DASKLAS

SEQ ID NO: 186 - protein, 7 aa, Oryctolagus Cuniculus
GAFNLES

SEQ ID NO: 187 - protein, 13 aa, Oryctolagus Cuniculus
QGEFSCGSADCTA

SEQ ID NO: 188 - protein, 12 aa, Oryctolagus Cuniculus
AGYRTYSDDDNA

SEQ ID NO: 189 - protein, 13 aa, Oryctolagus Cuniculus
LGNYDCSSADCDA

SEQ ID NO: 190 - protein, 10 aa, Oryctolagus Cuniculus
QGGYSGNIYP

SEQ ID NO: 191 - protein, 12 aa, Oryctolagus Cuniculus
QGSYYSSGWYRA

SEQ ID NO: 192 - protein, 15 aa, Oryctolagus Cuniculus
QGYFWSSSTIYAFWA

SEQ ID NO: 193 - protein, 328 aa, Homo sapiens
ASTKGPSVFPLAPSSKSTSGGTAALGCLVKDYFPEPVTVSWNSGALTSGVHTFPAVLQSSGLYSLSSVVTVPSSSLGTQTYICNVNHKPSNTKVDKKVEPKSCDKTHTCPPCPAPELRRGPKVFLFPPKPKDTLMISRTPEVTCVVVDVSHEDPEVKFNWYVDGVEVHNAKTKPREEQYNSTYRVVSVLTVLHQDWLNGKEYKCKVSNKALPAPIEKTISKAKGQPREPQVYTLPPSREEMTKNQVSLTCLVKGFYPSDIAVEWESNGQPENNYKTTPPVLDSDGSFFLYSKLTVDKSRWQQGNVFSCSVMHEALHNHYTQKSLSLSP

SEQ ID NO: 194 - DNA, 324 bp, Homo sapiens
cgtacggtggctgcaccatctgtcttcatcttcccgccatctgatgagcagttgaaatctggaactgcctctgttgtgtgcctgctgaataacttctatcccagagaggccaaagtacagtggaaggtggataacgccctccaatcgggtaactcccaggagagtgtcacagagcaggacagtaaggactgcacctacagtctcagtagtaccctgacgctgtccaaagcagactacgagaaacacaaagtctacgcctgcgaagtcacccatcagggcctgtcctcgcccgtcacaaagtccttcaacaggggagagtgttga

SEQ ID NO: 195 - protein, 330 aa, Homo sapiens [sequence omitted]

SEQ ID NO: 196 - protein, 326 aa, Homo sapiens
ASTKGPSVFPLAPCSRSTSESTAALGCLVKDYFPEPVTVSWNSGALTSGVHTFPAVLQSSGLYSLSSVVTVPSSNFGTQTYTCNVDHKPSNTKVDKTVERKCCVECPPCPAPPVAGPSVFLFPPKPKDTLMISRTPEVTCVVVDVSHEDPEVQFNWYVDGVEVHNAKTKPREEQFNSTFRVVSVLTVVHQDWLNGKEYKCKVSNKGLPAPIEKTISKTKGQPREPQVYTLPPSREEMTKNQVSLTCLVKGFYPSDIAVEWESNGQPENNYKTTPPMLDSDGSFFLYSKLTVDKSRWQQGNVFSCSVMHEALHNHYTQKSLSLSPGK

SEQ ID NO: 197 - protein, 377 aa, Homo sapiens
ASTKGPSVFPLAPCSRSTSGGTAALGCLVKDYFPEPVTVSWNSGALTSGVHTFPAVLQSSGLYSLSSVVTVPSSSLGTQTYTCNVNHKPSNTKVDKRVELKTPLGDTTHTCPRCPEPKSCDTPPPCPRCPEPKSCDTPPPCPRCPEPKSCDTPPPCPRCPAPELLGGPSVFLFPPKPKDTLMISRTPEVTCVVVDVSHEDPEVQFKWYVDGVEVHNAKTKPREEQYNSTFRVVSVLTVLHQDWLNGKEYKCKVSNKALPAPIEKTISKTKGQPREPQVYTLPPSREEMTKNQVSLTCLVKGFYPSDIAVEWESSGQPENNYNTTPPMLDSDGSFFLYSKLTVDKSRWQQGNIFSCSVMHEALHNRFTQKSLSLSPGK

SEQ ID NO: 198 - protein, 327 aa, Homo sapiens
ASTKGPSVFPLAPCSRSTSESTAALGCLVKDYFPEPVTVSWNSGALTSGVHTFPAVLQSSGLYSLSSVVTVPSSSLGTKTYTCNVDHKPSNTKVDKRVESKYGPPCPSCPAPEFLGGPSVFLFPPKPKDTLMISRTPEVTCVVVDVSQEDPEVQFNWYVDGVEVHNAKTKPREEQFNSTYRVVSVLTVLHQDWLNGKEYKCKVSNKGLPSSIEKTISKAKGQPREPQVYTLPPSQEEMTKNQVSLTCLVKGFYPSDIAVEWESNGQPENNYKTTPPVLDSDGSFFLYSRLTVDKSRWQEGNVFSCSVMHEALHNHYTQKSLSLSLGK

SEQ ID NO: 199 - DNA, 1125 bp, Homo sapiens
atgtggttcttgacaactctgctcctttgggttccagttgatgggcaagtggacaccacaaaggcagtgatcactttgcagcctccatgggtcagcgtgttccaagaggaaaccgtaaccttgcactgtgaggtgctccatctgcctgggagcagctctacacagtggtttctcaatggcacagccactcagacctcgacccccagctacagaatcacctctgccagtgtcaatgacagtggtgaatacaggtgccagagaggtctctcagggcgaagtgaccccatacagctggaaatccacagaggctggctactactgcaggtctccagcagagtcttcacggaaggagaacctctggccttgaggtgtcatgcgtggaaggataagctggtgtacaatgtgctttactatcgaaatggcaaagcctttaagtttttccactggaattctaacctcaccattctgaaaaccaacataagtcacaatggcacctaccattgctcaggcatgggaaagcatcgctacacatcagcaggaatatctgtcactgtgaaagagctatttccagctccagtgctgaatgcatctgtgacatccccactcctggaggggaatctggtcaccctgagctgtgaaacaaagttgctcttgcagaggcctggtttgcagctttacttctccttctacatgggcagcaagaccctgcgaggcaggaacacatcctctgaataccaaatactaactgctagaagagaagactctgggttatactggtgcgaggctgccacagaggatggaaatgtccttaagcgcagccctgagttggagcttcaagtgcttggcctccagttaccaactcctgtctggtttcatgtccttttctatctggcagtgggaataatgtttttagtgaacactgttctctgggtgacaatacgtaaagaactgaaaagaaagaaaaagtgggatttagaaatctctttggattctggtcatgagaagaaggtaatttccagccttcaagaagacagacatttagaagaagagctgaaatgtcaggaacaaaaagaagaacagctgcaggaaggggtgcaccggaaggagccccagggggccacgtag

SEQ ID NO: 200 - DNA, 951 bp, Homo sapiens
atgactatggagacccaaatgtctcagaatgtatgtcccagaaacctgtggctgcttcaaccattgacagttttgctgctgctggcttctgcagacagtcaagctgctcccccaaaggctgtgctgaaacttgagcccccgtggatcaacgtgctccaggaggactctgtgactctgacatgccagggggctcgcagccctgagagcgactccattcagtggttccacaatgggaatctcattcccacccacacgcagcccagctacaggttcaaggccaacaacaatgacagcggggagtacacgtgccagactggccagaccagcctcagcgaccctgtgcatctgactgtgctttccgaatggctggtgctccagacccctcacctggagttccaggagggagaaaccatcatgctgaggtgccacagctggaaggacaagcctctggtcaaggtcacattcttccagaatggaaaatcccagaaattctcccatttggatcccaccttctccatcccacaagcaaaccacagtcacagtggtgattaccactgcacaggaaacataggctacacgctgttctcatccaagcctgtgaccatcactgtccaagtgcccagcatgggcagctcttcaccaatgggggtcattgtggctgtggtcattgcgactgctgtagcagccattgttgctgctgtagtggccttgatctactgcaggaaaaagcggatttcagccaattccactgatcctgtgaaggctgcccaatttgagccacctggacgtcaaatgattgccatcagaaagagacaacttgaagaaaccaacaatgactatgaaacagctgacggcggctacatgactctgaaccccagggcacctactgacgatgataaaaacatctacctgactcttcctcccaacgaccatgtcaacagtaataactaa

SEQ ID NO: 201 - DNA, 954 bp, Homo sapiens
atgactatggagacccaaatgtctcagaatgtatgtcccagaaacctgtggctgcttcaaccattgacagttttgctgctgctggcttctgcagacagtcaagctgcagctcccccaaaggctgtgctgaaacttgagcccccgtggatcaacgtgctccaggaggactctgtgactctgacatgccagggggctcgcagccctgagagcgactccattcagtggttccacaatgggaatctcattcccacccacacgcagcccagctacaggttcaaggccaacaacaatgacagcggggagtacacgtgccagactggccagaccagcctcagcgaccctgtgcatctgactgtgctttccgaatggctggtgctccagacccctcacctggagttccaggagggagaaaccatcatgctgaggtgccacagctggaaggacaagcctctggtcaaggtcacattcttccagaatggaaaatcccagaaattctcccatttggatcccaccttctccatcccacaagcaaaccacagtcacagtggtgattaccactgcacaggaaacataggctacacgctgttctcatccaagcctgtgaccatcactgtccaagtgcccagcatgggcagctcttcaccaatggggatcattgtggctgtggtcattgcgactgctgtagcagccattgttgctgctgtagtggccttgatctactgcaggaaaaagcggatttcagccaattccactgatcctgtgaaggctgcccaatttgagccacctggacgtcaaatgattgccatcagaaagagacaacttgaagaaaccaacaatgactatgaaacagctgacggcggctacatgactctgaaccccagggcacctactgacgatgataaaaacatctacctgactcttcctcccaacgaccatgtcaacagtaataactaa

SEQ ID NO: 202 - DNA, 876 bp, Homo sapiens
atgggaatcctgtcattcttacctgtccttgccactgagagtgactgggctgactgcaagtccccccagccttggggtcatatgcttctgtggacagctgtgctattcctggctcctgttgctgggacacctgcagctcccccaaaggctgtgctgaaactcgagccccagtggatcaacgtgctccaggaggactctgtgactctgacatgccgggggactcacagccctgagagcgactccattcagtggttccacaatgggaatctcattcccacccacacgcagcccagctacaggttcaaggccaacaacaatgacagcggggagtacacgtgccagactggccagaccagcctcagcgaccctgtgcatctgactgtgctttctgagtggctggtgctccagacccctcacctggagttccaggagggagaaaccatcgtgctgaggtgccacagctggaaggacaagcctctggtcaaggtcacattcttccagaatggaaaatccaagaaattttcccgttcggatcccaacttctccatcccacaagcaaaccacagtcacagtggtgattaccactgcacaggaaacataggctacacgctgtactcatccaagcctgtgaccatcactgtccaagctcccagctcttcaccgatggggatcattgtggctgtggtcactgggattgctgtagcggccattgttgctgctgtagtggccttgatctactgcaggaaaaagcggatttcagccaatcccactaatcctgatgaggctgacaaagttggggctgagaacacaatcacctattcacttctcatgcacccggatgctctggaagagcctgatgaccagaaccgtatttag

SEQ ID NO: 203 - DNA, 933 bp, Homo sapiens
atgggaatcctgtcattcttacctgtccttgccactgagagtgactgggctgactgcaagtccccccagccttggggtcatatgcttctgtggacagctgtgctattcctggctcctgttgctgggacacctgcagctcccccaaaggctgtgctgaaactcgagccccagtggatcaacgtgctccaggaggactctgtgactctgacatgccgggggactcacagccctgagagcgactccattcagtggttccacaatgggaatctcattcccacccacacgcagcccagctacaggttcaaggccaacaacaatgacagcggggagtacacgtgccagactggccagaccagcctcagcgaccctgtgcatctgactgtgctttctgagtggctggtgctccagacccctcacctggagttccaggagggagaaaccatcgtgctgaggtgccacagctggaaggacaagcctctggtcaaggtcacattcttccagaatggaaaatccaagaaattttcccgttcggatcccaacttctccatcccacaagcaaaccacagtcacagtggtgattaccactgcacaggaaacataggctacacgctgtactcatccaagcctgtgaccatcactgtccaagctcccagctcttcaccgatggggatcattgtggctgtggtcactgggattgctgtagcggccattgttgctgctgtagtggccttgatctactgcaggaaaaagcggatttcagctctcccaggataccctgagtgcagggaaatgggagagaccctccctgagaaaccagccaatcccactaatcctgatgaggctgacaaagttggggctgagaacacaatcacctattcacttctcatgcacccggatgctctggaagagcctgatgaccagaaccgtatttag

SEQ ID NO: 204 - DNA, 765 bp, Homo sapiens
atgtggcagctgctcctcccaactgctctgctacttctagtttcagctggcatgcggactgaagatctcccaaaggctgtggtgttcctggagcctcaatggtacagggtgctcgagaaggacagtgtgactctgaagtgccagggagcctactcccctgaggacaattccacacagtggtttcacaatgagagcctcatctcaagccaggcctcgagctacttcattgacgctgccacagttgacgacagtggagagtacaggtgccagacaaacctctccaccctcagtgacccggtgcagctagaagtccatatcggctggctgttgctccaggcccctcggtgggtgttcaaggaggaagaccctattcacctgaggtgtcacagctggaagaacactgctctgcataaggtcacatatttacagaatggcaaaggcaggaagtattttcatcataattctgacttctacattccaaaagccacactcaaagacagcggctcctacttctgcagggggcttgttgggagtaaaaatgtgtcttcagagactgtgaacatcaccatcactcaaggtttgtcagtgtcaaccatctcatcattctttccacctgggtaccaagtctctttctgcttggtgatggtactcctttttgcagtggacacaggactatatttctctgtgaagacaaacattcgaagctcaacaagagactggaaggaccataaatttaaatggagaaaggaccctcaagacaaatga

SEQ ID NO: 205 - DNA, 765 bp, Homo sapiens
atgtggcagctgctcctcccaactgctctgctacttctagtttcagctggcatgcggactgaagatctcccaaaggctgtggtgttcctggagcctcaatggtacagggtgctcgagaaggacagtgtgactctgaagtgccagggagcctactcccctgaggacaattccacacagtggtttcacaatgagagcctcatctcaagccaggcctcgagctacttcattgacgctgccacagtcgacgacagtggagagtacaggtgccagacaaacctctccaccctcagtgacccggtgcagctagaagtccatatcggctggctgttgctccaggcccctcggtgggtgttcaaggaggaagaccctattcacctgaggtgtcacagctggaagaacactgctctgcataaggtcacatatttacagaatggcaaaggcaggaagtattttcatcataattctgacttctacattccaaaagccacactcaaagacagcggctcctacttctgcagggggctttttgggagtaaaaatgtgtcttcagagactgtgaacatcaccatcactcaaggtttggcagtgtcaaccatctcatcattctttccacctgggtaccaagtctctttctgcttggtgatggtactcctttttgcagtggacacaggactatatttctctgtgaagacaaacattcgaagctcaacaagagactggaaggaccataaatttaaatggagaaaggaccctcaagacaaatga

SEQ ID NO: 206 - DNA, 702 bp, Homo sapiens
atgtggcagctgctcctcccaactgctctgctacttctagtttcagctggcatgcggactgaagatctcccaaaggctgtggtgttcctggagcctcaatggtacagcgtgcttgagaaggacagtgtgactctgaagtgccagggagcctactcccctgaggacaattccacacagtggtttcacaatgagagcctcatctcaagccaggcctcgagctacttcattgacgctgccacagtcaacgacagtggagagtacaggtgccagacaaacctctccaccctcagtgacccggtgcagctagaagtccatatcggctggctgttgctccaggcccctcggtgggtgttcaaggaggaagaccctattcacctgaggtgtcacagctggaagaacactgctctgcataaggtcacatatttacagaatggcaaagacaggaagtattttcatcataattctgacttccacattccaaaagccacactcaaagatagcggctcctacttctgcagggggcttgttgggagtaaaaatgtgtcttcagagactgtgaacatcaccatcactcaaggtttggcagtgtcaaccatctcatcattctctccacctgggtaccaagtctctttctgcttggtgatggtactcctttttgcagtggacacaggactatatttctctgtgaagacaaacatttga

SEQ ID NO: 207 - protein, 374 aa, Homo sapiens
MWFLTTLLLWVPVDGQVDTTKAVITLQPPWVSVFQEETVTLHCEVLHLPGSSSTQWFLNGTATQTSTPSYRITSASVNDSGEYRCQRGLSGRSDPIQLEIHRGWLLLQVSSRVFTEGEPLALRCHAWKDKLVYNVLYYRNGKAFKFFHWNSNLTILKTNISHNGTYHCSGMGKHRYTSAGISVTVKELFPAPVLNASVTSPLLEGNLVTLSCETKLLLQRPGLQLYFSFYMGSKTLRGRNTSSEYQILTARREDSGLYWCEAATEDGNVLKRSPELELQVLGLQLPTPVWFHVLFYLAVGIMFLVNTVLWVTIRKELKRKKKWDLEISLDSGHEKKVISSLQEDRHLEEELKCQEQKEEQLQEGVHRKEPQGAT

SEQ ID NO: 208 - protein, 316 aa, Homo sapiens
MTMETQMSQNVCPRNLWLLQPLTVLLLLASADSQAAPPKAVLKLEPPWINVLQEDSVTLTCQGARSPESDSIQWFHNGNLIPTHTQPSYRFKANNNDSGEYTCQTGQTSLSDPVHLTVLSEWLVLQTPHLEFQEGETIMLRCHSWKDKPLVKVTFFQNGKSQKFSHLDPTFSIPQANHSHSGDYHCTGNIGYTLFSSKPVTITVQVPSMGSSSPMGVIVAVVIATAVAAIVAAVVALIYCRKKRISANSTDPVKAAQFEPPGRQMIAIRKRQLEETNNDYETADGGYMTLNPRAPTDDDKNIYLTLPPNDHVNSNN

SEQ ID NO: 209 - protein, 317 aa, Homo sapiens
MTMETQMSQNVCPRNLWLLQPLTVLLLLASADSQAAAPPKAVLKLEPPWINVLQEDSVTLTCQGARSPESDSIQWFHNGNLIPTHTQPSYRFKANNNDSGEYTCQTGQTSLSDPVHLTVLSEWLVLQTPHLEFQEGETIMLRCHSWKDKPLVKVTFFQNGKSQKFSHLDPTFSIPQANHSHSGDYHCTGNIGYTLFSSKPVTITVQVPSMGSSSPMGIIVAVVIATAVAAIVAAVVALIYCRKKRISANSTDPVKAAQFEPPGRQMIAIRKRQLEETNNDYETADGGYMTLNPRAPTDDDKNIYLTLPPNDHVNSNN

SEQ ID NO: 210 - protein, 218 aa, Homo sapiens
MTMETQMSQNVCPRNLWLLQPLTVLLLLASADSQAAAPPKAVLKLEPPWINVLQEDSVTLTCQGARSPESDSIQWFHNGNLIPTHTQPSYRFKANNNDSGEYTCQTGQTSLSDPVHLTVLSEWLVLQTPHLEFQEGETIMLRCHSWKDKPLVKVTFFQNGKSQKFSRLDPTFSIPQANHSHSGDYHCTGNIGYTLFSSKPVTITVQVPSMGSSSPMGI

SEQ ID NO: 211 - protein, 218 aa, Homo sapiens
MTMETQMSQNVCPRNLWLLQPLTVLLLLASADSQAAAPPKAVLKLEPPWINVLQEDSVTLTCQGARSPESDSIQWFHNGNLIPTHTQPSYRFKANNNDSGEYTCQTGQTSLSDPVHLTVLSEWLVLQTPHLEFQEGETIMLRCHSWKDKPLVKVTFFQNGKSQKFSHLDPTFSIPQANHSHSGDYHCTGNIGYTLFSSKPVTITVQVPSMGSSSPMGI

SEQ ID NO: 212 - protein, 291 aa, Homo sapiens
MGILSFLPVLATESDWADCKSPQPWGHMLLWTAVLFLAPVAGTPAAPPKAVLKLEPQWINVLQEDSVTLTCRGTHSPESDSIQWFHNGNLIPTHTQPSYRFKANNNDSGEYTCQTGQTSLSDPVHLTVLSEWLVLQTPHLEFQEGETIVLRCHSWKDKPLVKVTFFQNGKSKKFSRSDPNFSIPQANHSHSGDYHCTGNIGYTLYSSKPVTITVQAPSSSPMGIIVAVVTGIAVAAIVAAVVALIYCRKKRISANPTNPDEADKVGAENTITYSLLMHPDALEEPDDQNRI

SEQ ID NO: 213 - protein, 310 aa, Homo sapiens
MGILSFLPVLATESDWADCKSPQPWGHMLLWTAVLFLAPVAGTPAAPPKAVLKLEPQWINVLQEDSVTLTCRGTHSPESDSIQWFHNGNLIPTHTQPSYRFKANNNDSGEYTCQTGQTSLSDPVHLTVLSEWLVLQTPHLEFQEGETIVLRCHSWKDKPLVKVTFFQNGKSKKFSRSDPNFSIPQANHSHSGDYHCTGNIGYTLYSSKPVTITVQAPSSSPMGIIVAVVTGIAVAAIVAAVVALIYCRKKRISALPGYPECREMGETLPEKPANPTNPDEADKVGAENTITYSLLMHPDALEEPDDQNRI

SEQ ID NO: 214 - protein, 217 aa, Homo sapiens
MGILSFLPVLATESDWADCKSPQPWGHMLLWTAVLFLAPVAGTPAAPPKAVLKLEPQWINVLQEDSVTLTCRGTHSPESDSIQWFHNGNLIPTHTQPSYRFKANNNDSGEYTCQTGQTSLSDPVHLTVLSEWLVLQTPHLEFQEGETIVLRCHSWKDKPLVKVTFFQNGKSKKFSRSDPNFSIPQANHSHSGDYHCTGNIGYTLYSSKPVTITVQAP

SEQ ID NO: 215 - protein, 254 aa, Homo sapiens [sequence omitted]

SEQ ID NO: 216 - protein, 254 aa, Homo sapiens
MWQLLLPTALLLLVSAGMRTEDLPKAVVFLEPQWYRVLEKDSVTLKCQGAYSPEDNSTQWFHNESLISSQASSYFIDAATVDDSGEYRCQTNLSTLSDPVQLEVHIGWLLLQAPRWVFKEEDPIHLRCHSWKNTALHKVTYLQNGKGRKYFHHNSDFYIPKATLKDSGSYFCRGLFGSKNVSSETVNITITQGLAVSTISSFFPPGYQVSFCLVMVLLFAVDTGLYFSVKTNIRSSTRDWKDHKFKWRKDPQDK

SEQ ID NO: 217 - protein, 208 aa, Homo sapiens
MWQLLLPTALLLLVSAGMRTEDLPKAVVFLEPQWYRVLEKDSVTLKCQGAYSPEDNSTQWFHNESLISSQASSYFIDAATVDDSGEYRCQTNLSTLSDPVQLEVHIGWLLLQAPRWVFKEEDPIHLRCHSWKNTALHKVTYLQNGKGRKYFHHNSDFYIPKATLKDSGSYFCRGLFGSKNVSSETVNITITQGLAVSTISSFFPPGYQ

SEQ ID NO: 218 - protein, 208 aa, Homo sapiens
MWQLLLPTALLLLVSAGMRTEDLPKAVVFLEPQWYRVLEKDSVTLKCQGAYSPEDNSTQWFHNESLISSQASSYFIDAATVDDSGEYRCQTNLSTLSDPVQLEVHIGWLLLQAPRWVFKEEDPIHLRCHSWKNTALHKVTYLQNGKGRKYFHHNSDFYIPKATLKDSGSYFCRGLVGSKNVSSETVNITITQGLAVSTISSFFPPGYQ

SEQ ID NO: 219 - protein, 233 aa, Homo sapiens
MWQLLLPTALLLLVSAGMRTEDLPKAVVFLEPQWYSVLEKDSVTLKCQGAYSPEDNSTQWFHNESLISSQASSYFIDAATVNDSGEYRCQTNLSTLSDPVQLEVHIGWLLLQAPRWVFKEEDPIHLRCHSWKNTALHKVTYLQNGKDRKYFHHNSDFHIPKATLKDSGSYFCRGLVGSKNVSSETVNITITQGLAVSTISSFSPPGYQVSFCLVMVLLFAVDTGLYFSVKTNI

SEQ ID NO: 220 - protein, 211 aa, artificial sequence
  cynomolgous monkey- cynoFcgRIIa1
MSQNVCPGNLWLLQPLTVLLLLASADSQTAPPKAVLKLEPPWINVLREDSVTLTCGGAHSPDSDSTQWFHNGNLIPTHTQPSYRFKANNNDSGEYRCQTGRTSLSDPVHLTVLSEWLALQTPHLEFREGETIMLRCHSWKDKPLIKVTFFQNGIAKKFSHMDPNFSIPRANHSHSGDYHCTGNIGYTPYSSKPVTITVQVPSVGSSSPMGI

SEQ ID NO: 221 - protein, 211 aa, artificial sequence
  cynomolgous monkey-cynoFcgRIIa2
MSQNVCPGNLWLLQPLTVLLLLASADSQTAPPKAVLKLEPPWINVLREDSVTLTCGGAHSPDSDSTQWFHNGNLIPTHTQPSYRFKANNNDSGEYRCQTGRTSLSDPVHLTVLSEWLALQTTHLEFREGETIMLRCHSWKDKPLIKVAFFQNGKSKNFSHMNPNFSIPQANHSHSGDYHCTGNIGYTPYSSKPVTITVQVPSVGSSSPMGI

SEQ ID NO: 222 - protein, 211 aa, artificial sequence
  cynomolgous monkey- cynoFcgRIIa3
MSQNVCPGNLWLLQPLTVLLLLASADSQTAPPKAVLKLEPPWINVLREDSVTLTCGGAHSPDSDSTQWFHNGNLIPTHTQPSYRFKANNNDSGEYRCQTGRTSLSDPVHLTVLSEWLALQTTHLEFREGETIMLRCHSWKDKPLIKVAFFQNGISKKFSPMNPNFSIPRANHSHSGDYHCTGNIGYTPYSSKPVTITVQVPSVGSSSPMGI

SEQ ID NO: 223 - protein, 217 aa, artificial sequence
  cynomolgous monkey-cynoFcgRIIb
MGILSFLPVLATESDWADCKSSQPWGHMLLWTAVLFLAPVAGTPAAPPKAVLKLEPPWINVLREDSVTLTCGGAHSPDSDSTQWFHNGNLIPTHTQPSYRFKANNNDSGEYRCQTGRTSLSDPVHLTVLSEWLALQTPHLEFREGETIMLRCHSWKDKPLIKVTFFQNGISKKFSHMNPNFSIPQANHSHSGDYHCTGNIGYTPYSSKPVTITVQVP

SEQ ID NO: 224 - protein, 208 aa, artificial sequence
  cynomolgous monkey-cynoFcgRIIIaS
MWQLLLPTALLLLVSAGMRAEDLPKAVVFLEPQWYRVLEKDSVTLKCQGAYSPEDNSTRWFHNESLISSQTSSYFIAAARVNNSGEYRCQTSLSTLSDPVQLEVHIGWLLLQAPRWVFKEEESIHLRCHSWKNTLLHKVTYLQNGKGRKYFHQNSDFYIPKATLKDSGSYFCRGLIGSKNVSSETVNITITQDLAVSSISSFFPPGYQ

SEQ ID NO: 225 - protein, 115 aa, Homo sapiens
QVQLVQSGAEVKKPGASVTVSCKASGYTFTDYEMHWIRQPPGEGLEWIGAIDPKTGDTAYSESFQDRVTLTADKSTSTAYMELSSLTSEDTAVYYCTRFYSYTYWGQGTLVTVSS

SEQ ID NO: 226 - protein, 219 aa, Homo sapiens
DIVMTQSPLSLPVTPGEPASISCQASESLVHSNRNTYLHWYLQKPGQSPQLLIYKVSNRFSGVPDRFSGSGSGTDFTLKISRVEAEDVGVYYCSQNTHVPPTFGQGTKVEIERTVAAPSVFIFPPSDEQLKSGTASVVCLLNNFYPREAKVQWKVDNALQSGNSQESVTEQDSKDSTYSLSSTLTLSKADYEKHKVYACEVTHQGLSSPVTKSFNRGEC

SEQ ID NO: 227 - protein, 328 aa, Homo sapiens
ASTKGPSVFPLAPSSKSTSGGTAALGCLVKDYFPEPVTVSWNSGALTSGVHTFPAVLQSSGLYSLSSVVTVPSSSLGTQTYICNVNHKPSNTKVDKKVEPKSCDKTHTCPPCPAPELLGGPSVFLFPPKPKDTLMISRTPEVTCVVVDVSHEDPEVKFNWYVDGVEVHNAKTKPREEQYNSTYRVVSVLTVLHQDWLNGKEYKCKVSNKALPAPIEKTISKAKGQPREPQVYTLPPSRDELTKNQVSLTCLVKGFYPSDIAVEWESNGQPENNYKTTPPVLDSDGSFFLYSKLTVDKSRWQQGNVFSCSVMHEALHNHYTQKSLSLSP

SEQ ID NO: 228 - protein, 328 aa, Homo sapiens
ASTKGPSVFPLAPSSKSTSGGTAALGCLVKDYFPEPVTVSWNSGALTSGVHTFPAVLQSSGLYSLSSVVTVPSSSLGTQTYICNVNHKPSNTKVDKKVEPKSCDKTHTCPPCPAPELLGGPSVFLFPPKPKDTLMISRTPEVTCVVVDVSHEDPEVKFNWYVDGVEVHNAKTKPREEQYNSTYRVVSVLTVLHQDWLNGKEYKCKVSNKALPAPIEKTISKAKGQPREPQVYTLPPSRDELTKNQVSLTCLVKGFYPSDIAVEWESNGQPENNYKTTPPVLDSDGSFFLYSKLTVDKSRWQQGNVFSCSVMHEALHNHYTQESLSLSP

SEQ ID NO: 229 - protein, 328 aa, Homo sapiens
ASTKGPSVFPLAPSSKSTSGGTAALGCLVKDYFPEPVTVSWNSGALTSGVHTFPAVLQSSGLYSLSSVVTVPSSSLGTQTYICNVNHKPSNTKVDKKVEPKSCDKTHTCPPCPAPELLNGPSVFLFPPKPKDTLMISRTPEVTCVVVDVSEEDPEVKFNWYVDGVEVHNAKTKPREEQYNSTYRVVSVLTVLHQDWLNGKEYKCKVSNKALPKPIEKTISKAKGQPREPQVYTLPPSREEMTKNQVSLTCLVKGFYPSDIAVEWESNGQPENNYKTTPMVLDSDGSFFLYSKLTVDKSRWQQGNVFSCSVMHEALHNHYTQKSLSLSP

SEQ ID NO: 230 - protein, 328 aa, Homo sapiens
ASTKGPSVFPLAPSSKSTSGGTAALGCLVKDYFPEPVTVSWNSGALTSGVHTFPAVLQSSGLYSLSSVVTVPSSSLGTQTYICNVNHKPSNTKVDKKVEPKSCDKTHTCPPCPAPELLNGPSVFLFPPKPKDTLMISRTPEVTCVVVDVSEEDPEVKFNWYVDGVEVHNAKTKPREEQYNSTYRVVSVLTVLHQDWLNGKEYKCKVSNKALPKPIEKTISKAKGQPREPQVYTLPPSREEMTKNQVSLTCLVKGFYPSDIAVEWESNGQPENNYKTTPMVLDRDGSFFLYSKLTVKKSRWQQGNVFSCSVMHEALHNHYTQKSLSLSP

SEQ ID NO: 231 - protein, 328 aa, Homo sapiens
ASTKGPSVFPLAPSSKSTSGGTAALGCLVKDYFPEPVTVSWNSGALTSGVHTFPAVLQSSGLYSLSSVVTVPSSSLGTQTYICNVNHKPSNTKVDKKVEPKSCDKTHTCPPCPAPELLNGPSVFLFPPKPKDTLMISRTPEVTCVVVDVSDEDPEVKFNWYVDGVEVHNAKTKPREEQYNSTYRVVSVLTVLHQDWLNGKEYKCKVSNKALPKPIEKTISKAKGQPREPQVYTLPPSREEMTKNQVSLTCLVKGFYPSDIAVEWESNGQPENNYKTTPPVLDSDGSFFLYSKLTVDKSRWQQGNVFSCSVMHEALHNHYTQKSLSLSP

SEQ ID NO: 232 - protein, 328 aa, Homo sapiens
ASTKGPSVFPLAPSSKSTSGGTAALGCLVKDYFPEPVTVSWNSGALTSGVHTFPAVLQSSGLYSLSSVVTVPSSSLGTQTYICNVNHKPSNTKVDKKVEPKSCDKTHTCPPCPAPELLNGPSVFLFPPKPKDTLMISRTPEVTCVVVDVSDEDPEVKFNWYVDGVEVHNAKTKPREEQYNSTYRVVSVLTVLHRDWLNGKEYKCKVSNKALPKPIEKTISKAKGQPREPQVYTLPPSREEMTKNQVSLTCLVKGFYPSDIAVEWESNGQPENNYKTTPPVLDSDGSFFLYSKLTVKKSRWQQGNVFSCSVMHEALHNHYTQKSLSLSP

SEQ ID NO: 233 - protein, 328 aa, Homo sapiens
ASTKGPSVFPLAPSSKSTSGGTAALGCLVKDYFPEPVTVSWNSGALTSGVHTFPAVLQSSGLYSLSSVVTVPSSSLGTQTYICNVNHKPSNTKVDKKVEPKSCDKTHTCPPCPAPELLNGPSVFLFPPKPKDTLMISRTPEVTCVVVDVSDEDPEVKFNWYVDGVEVHNAKTKPREELYNSTYRVVSVLTVLHQDWLNGKEYKCKVSNKALPKPIEKTISKAKGQPREPQVYTLPPSREEMTKNQVSLTCLVKGFYPSDIAVEWESNGQPENNYKTTPPVLDSDGSFFLYSKLTVDKSRWQQGNVFSCSVMHEALHNHYTQKSLSLSP

SEQ ID NO: 234 - protein, 328 aa, Homo sapiens
ASTKGPSVFPLAPSSKSTSGGTAALGCLVKDYFPEPVTVSWNSGALTSGVHTFPAVLQSSGLYSLSSVVTVPSSSLGTQTYICNVNHKPSNTKVDKKVEPKSCDKTHTCPPCPAPELLNGPSVFLFPPKPKDTLMISRTPEVTCVVVDVSDEDPEVKFNWYVDGVEVHNAKTKPREELYNSTYRVVSVLTVLHRDWLNGKEYKCKVSNKALPKPIEKTISKAKGQPREPQVYTLPPSREEMTKNQVSLTCLVKGFYPSDIAVEWESNGQPENNYKTTPPVLDSDGSFFLYSKLTVKKSRWQQGNVFSCSVMHEALHNHYTQKSLSLSP

SEQ ID NO: 235 - protein, 328 aa, Homo sapiens
ASTKGPSVFPLAPSSKSTSGGTAALGCLVKDYFPEPVTVSWNSGALTSGVHTFPAVLQSSGLYSLSSVVTVPSSSLGTQTYICNVNHKPSNTKVDKKVEPKSCDKTHTCPPCPAPELLTGPSVFLFPPKPKDTLMISRTPEVTCVVVDVSDEDPEVKFNWYVDGVEVHNAKTKPREEQYNSTYRVVSVLTVLHRDWLNGKEYKCKVSNKALPKPIEKTISKAKGQPREPQVYTLPPSREEMTKNQVSLTCLVKGFYPSDIAVEWESNGQPENNYKTTPPVLDSDGSFFLYSKLTVKKSRWQQGNVFSCSVMHEALHNHYTQKSLSLSP

SEQ ID NO: 236 - protein, 328 aa, Homo sapiens
ASTKGPSVFPLAPSSKSTSGGTAALGCLVKDYFPEPVTVSWNSGALTSGVHTFPAVLQSSGLYSLSSVVTVPSSSLGTQTYICNVNHKPSNTKVDKKVEPKSCDKTHTCPPCPAPELLNGPSVFLFPPKPKDTLMISRTPEVTCVVVDVSEEDPEVKFNWYVDGVEVHNAKTKPREEQYNSTYRVVSVLTVLHQDWLNGKEYKCKVSNKALPKPIEKTISKAKGQPREPQVYTLPPSREEMTKNQVSLTCLVKGFYPSDIAVEWESNGQPENNYKTTPMVLDSDGSFFLYSKLTVDKSRWQQGNVFSCSVMHEALHAHYTQKSLSLSP

SEQ ID NO: 237 - protein, 328 aa, Homo sapiens
ASTKGPSVFPLAPSSKSTSGGTAALGCLVKDYFPEPVTVSWNSGALTSGVHTFPAVLQSSGLYSLSSVVTVPSSSLGTQTYICNVNHKPSNTKVDKKVEPKSCDKTHTCPPCPAPELLNGPSVFLFPPKPKDTLMISRTPEVTCVVVDVSEEDPEVKFNWYVDGVEVHNAKTKPREEQYNSTYRVVSVLTVLHRDWLNGKEYKCKVSNKALPKPIEKTISKAKGQPREPQVYTLPPSREEMTKNQVSLTCLVKGFYPSDIAVEWESNGQPENNYKTTPMVLRSDGSFFLYSKLTVDKSRWQQGNVFSCSVMHEALHAHYTQKSLSLSP

SEQ ID NO: 238 - protein, 328 aa, Homo sapiens
ASTKGPSVFPLAPSSKSTSGGTAALGCLVKDYFPEPVTVSWNSGALTSGVHTFPAVLQSSGLYSLSSVVTVPSSSLGTQTYICNVNHKPSNTKVDKKVEPKSCDKTHTCPPCPAPELLNGPSVFLFPPKPKDTLMISRTPEVTCVVVDVSDEDPEVKFNWYVDGVEVHNAKTKPREELYNSTYRVVSVLTVLHRDWLNGKEYKCKVSNKALPKPIEKTISKAKGQPREPQVYTLPPSREEMTKNQVSLTCLVKGFYPSDIAVEWESNGQPENNYKTTPPVLDSDGSFFLYSKLTVKKSRWQQGNVFSCSVMHEALHAHYTQKSLSLSP

SEQ ID NO: 239 - protein, 328 aa, Homo sapiens
ASTKGPSVFPLAPSSKSTSGGTAALGCLVKDYFPEPVTVSWNSGALTSGVHTFPAVLQSSGLYSLSSVVTVPSSSLGTQTYICNVNHKPSNTKVDKKVEPKSCDKTHTCPPCPAPELLNGPSVFLFPPKPKDTLMISRTPEVTCVVVDVSDEDPEVKFNWYVDGVEVHNAKTKPREEQYNSTYRVVSVLTVLHRDWLNGKEYKCKVSNKALPKPIEKTISKAKGQPREPQVYTLPPSREEMTKNQVSLTCLVKGFYPSDIAVEWESNGQPENNYKTTPPVLDSDGSFFLYSKLTVKKSRWQQGNVFSCSVMHEALHAHYTQKSLSLSP

SEQ ID NO: 240 - protein, 328 aa, Homo sapiens
ASTKGPSVFPLAPSSKSTSGGTAALGCLVKDYFPEPVTVSWNSGALTSGVHTFPAVLQSSGLYSLSSVVTVPSSSLGTQTYICNVNHKPSNTKVDKKVEPKSCDKTHTCPPCPAPELLNGPSVFLFPPKPKDTLMISRTPEVTCVVVDVSDEDPEVKFNWYVDGVEVHNAKTKPREEQYNSTYRVVSVLTVLHQDWLNGKEYKCKVSNKALPKPIEKTISKAKGQPREPQVYTLPPSREEMTKNQVSLTCLVKGFYPSDIAVEWESNGQPENNYKTTPPVLDSDGSFFLYSKLTVDKSRWQQGNVFSCSVMHEALHAHYTQKSLSLSP

SEQ ID NO: 241 - protein, 328 aa, Homo sapiens
ASTKGPSVFPLAPSSKSTSGGTAALGCLVKDYFPEPVTVSWNSGALTSGVHTFPAVLQSSGLYSLSSVVTVPSSSLGTQTYICNVNHKPSNTKVDKKVEPKSCDKTHTCPPCPAPELLTGPSVFLFPPKPKDTLMISRTPEVTCVVVDVSDEDPEVKFNWYVDGVEVHNAKTKPREEQYNSTYRVVSVLTVLHRDWLNGKEYKCKVSNKALPKPIEKTISKAKGQPREPQVYTLPPSREEMTKNQVSLTCLVKGFYPSDIAVEWESNGQPENNYKTTPPVLDSDGSFFLYSKLTVKKSRWQQGNVFSCSVMHEALHAHYTQKSLSLSP

SEQ ID NO: 242 - protein, 328 aa, Homo sapiens
ASTKGPSVFPLAPSSKSTSGGTAALGCLVKDYFPEPVTVSWNSGALTSGVHTFPAVLQSSGLYSLSSVVTVPSSSLGTQTYICNVNHKPSNTKVDKKVEPKSCDKTHTCPPCPAPELLNGPSVFLFPPKPKDTLMISRTPEVTCVVVDVSDEDPEVKFNWYVDGVEVHNAKTKPREELYNSTYRVVSVLTVLHRDWLNGKEYKCKVSNKALPKPIEKTISKAKGQPREPQVYTLPPSREEMTKNQVSLTCLVKGFYPSDIAVEWESNGQPENNYKTTPPVLDSDGSFFLYSKLTVKKSRWQQGNVFSCSVLHEALHAHTTRKELSLSP

SEQ ID NO: 243 - protein, 328 aa, Homo sapiens
ASTKGPSVFPLAPSSKSTSGGTAALGCLVKDYFPEPVTVSWNSGALTSGVHTFPAVLQSSGLYSLSSVVTVPSSSLGTQTYICNVNHKPSNTKVDKKVEPKSCDKTHTCPPCPAPELLNGPSVFLFPPKPKDTLMISRTPEVTCVVVDVSDEDPEVKFNWYVDGVEVHNAKTKPREELYNSTYRVVSVLTVLHRDWLNGKEYKCKVSNTALPKPIEKTISKAKGQRREPQVYTLPPSREEMTKNQVSLTCLVKGFYPSDIAVEWESNGQPENNYKTTPPVLDSDGSFFLYSKLTVDKSRWQQGNVFSCSVLHEALHAHTTRKELSLSP

SEQ ID NO: 244 - protein, 328 aa, Homo sapiens
ASTKGPSVFPLAPSSKSTSGGTAALGCLVKDYFPEPVTVSWNSGALTSGVHTFPAVLQSSGLYSLSSVVTVPSSSLGTQTYICNVNHKPSNTKVDKKVEPKSCDKTHTCPPCPAPELWNGPSVFLFPPKPKDTLMISRTPEVTCVVVDVSDEDPEVKFNWYVDGVEVHNAKTKPREELYNSTYRVVSVLTVLHRDWLNGKEYKCKVSNTALPKPIEKTISKAKGQRREPQVYTLPPSREEMTKNQVSLTCLVKGFYPSDIAVEWESNGQPENNYKTTPPVLDSDGSFFLYSKLTVDKSRWQQGNVFSCSVLHEALHAHTTRKELSLSP

SEQ ID NO: 245 - protein, 328 aa, Homo sapiens
ASTKGPSVFPLAPSSKSTSGGTAALGCLVKDYFPEPVTVSWNSGALTSGVHTFPAVLQSSGLYSLSSVVTVPSSSLGTQTYICNVNHKPSNTKVDKKVEPKSCDKTHTCPPCPAPELLNGPSVFLFPPKPKDTLMISRTPEVTCVVVDVSDEDPEVKFNWYVDGVEVHNAKTKPREELYNSTYRVVSVLTVLHRDWLNGKEYKCKVSNKALPKPIEKTISKAKGQPREPQVYTLPPSREEMTKNQVSLTCLVKGFYPSDIAVEWESNGQPENNYKTTPPVLDSDGSFFLYSKLTVKKSRWQQGNVFSCSVMHEALHAHYTRKELSLSP

SEQ ID NO: 246 - protein, 328 aa, Homo sapiens
ASTKGPSVFPLAPSSKSTSGGTAALGCLVKDYFPEPVTVSWNSGALTSGVHTFPAVLQSSGLYSLSSVVTVPSSSLGTQTYICNVNHKPSNTKVDKKVEPKSCDKTHTCPPCPAPELLNGPSVFLFPPKPKDTLMISRTPEVTCVVVDVSDEDPEVKFNWYVDGVEVHNAKTKPREELYNSTYRVVSVLTVLHRDWLNGKEYKCKVSNTALPKPIEKTISKAKGQRREPQVYTLPPSREEMTKNQVSLTCLVKGFYPSDIAVEWESNGQPENNYKTTPPVLDSDGSFFLYSKLTVDKSRWQQGNVFSCSVMHEALHAHYTRKELSLSP

SEQ ID NO: 247 - protein, 328 aa, Homo sapiens
ASTKGPSVFPLAPSSKSTSGGTAALGCLVKDYFPEPVTVSWNSGALTSGVHTFPAVLQSSGLYSLSSVVTVPSSSLGTQTYICNVNHKPSNTKVDKKVEPKSCDKTHTCPPCPAPELWNGPSVFLFPPKPKDTLMISRTPEVTCVVVDVSDEDPEVKFNWYVDGVEVHNAKTKPREELYNSTYRVVSVLTVLHRDWLNGKEYKCKVSNTALPKPIEKTISKAKGQRREPQVYTLPPSREEMTKNQVSLTCLVKGFYPSDIAVEWESNGQPENNYKTTPPVLDSDGSFFLYSKLTVDKSRWQQGNVFSCSVMHEALHAHYTRKELSLSP

SEQ ID NO: 248 - protein, 328 aa, Homo sapiens
ASTKGPSVFPLAPSSKSTSGGTAALGCLVKDYFPEPVTVSWNSGALTSGVHTFPAVLQSSGLYSLSSVVTVPSSSLGTQTYICNVNHKPSNTKVDKKVEPKSCDKTHTCPPCPAPELLNGPSVFLFPPKPKDTLMISRTPEVTCVVVDVSDEDPEVKFNWYVDGVEVHNAKTKPREEQYNSTYRVVSVLTVLHRDWLNGKEYKCKVSNKALPKPIEKTISKAKGQPREPQVYTLPPSREEMTKNQVSLTCLVKGFYPSDIAVEWESNGQPENNYKTTPPVLDSDGSFFLYSKLTVRKSRWQQGNVFSCSVMHEALHNHYTQKSLSLSP

SEQ ID NO: 249 - protein, 328 aa, Homo sapiens
ASTKGPSVFPLAPSSKSTSGGTAALGCLVKDYFPEPVTVSWNSGALTSGVHTFPAVLQSSGLYSLSSVVTVPSSSLGTQTYICNVNHKPSNTKVDKKVEPKSCDKTHTCPPCPAPELLNGPSVFLFPPKPKDTLMISRTPEVTCVVVDVSDEDPEVKFNWYVDGVEVHNAKTKPREEQYNSTYRVVSVLTVLHRDWLNGKEYKCKVSNKALPKPIEKTISKAKGQRREPQVYTLPPSREEMTKNQVSLTCLVKGFYPSDIAVEWESNGQPENNYKTTPPVLDSDGSFFLYSKLTVDKSRWQQGNVFSCSVMHEALHNHYTQKSLSLSP

SEQ ID NO: 250 - protein, 328 aa, Homo sapiens
ASTKGPSVFPLAPSSKSTSGGTAALGCLVKDYFPEPVTVSWNSGALTSGVHTFPAVLQSSGLYSLSSVVTVPSSSLGTQTYICNVNHKPSNTKVDKKVEPKSCDKTHTCPPCPAPELLNGPSVFLFPPKPKDTLMISRTPEVTCVVVDVSDEDPEVKFNWYVDGVEVHNAKTKPREEQYNSTYRVVSVLTVLHRDWLNGKEYKCKVSNKALPKPIEKTISKAKGQRREPQVYTLPPSREEMTKNQVSLTCLVKGFYPSDIAVEWESNGQPENNYKTTPPVLDSDGSFFLYSKLTVRKSRWQQGNVFSCSVMHEALHNHYTQKSLSLSP

SEQ ID NO: 251 - protein, 328 aa, Homo sapiens
ASTKGPSVFPLAPSSKSTSGGTAALGCLVKDYFPEPVTVSWNSGALTSGVHTFPAVLQSSGLYSLSSVVTVPSSSLGTQTYICNVNHKPSNTKVDKKVEPKSCDKTHTCPPCPAPELLNGPSVFLFPPKPKDTLMISRTPEVTCVVVDVSDEDPEVKFNWYVDGVEVHNAKTKPREEQYNSTYRVVSVLTVLHRDWLNGKEYKCKVSNKALPKPIEKTISKAKGQPREPQVYTLPPSREEMTKNQVSLTCLVKGFYPSDIAVEWESRGQPENNYKTTPPVLDSDGSFFLYSKLTVRKSRWQQGNVFSCSVMHEALHNHYTQKSLSLSP

SEQ ID NO: 252 - protein, 328 aa, Homo sapiens
ASTKGPSVFPLAPSSKSTSGGTAALGCLVKDYFPEPVTVSWNSGALTSGVHTFPAVLQSSGLYSLSSVVTVPSSSLGTQTYICNVNHKPSNTKVDKKVEPKSCDKTHTCPPCPAPELLGGDSVFLFPPKPKDTLMISRTPEVTCVVVDVSHEDPEVKFNWYVDGVEVHNAKTKPREEQYNSTYRVVSVLTVLHQDWLNGKEYKCKVSNKALPAPIEKTISKAKGQPREPQVYTLPPSREEMTKNQVSLTCLVKGFYPSDIAVEWESNGQPENNYKTTPPVLDSDGSFFLYSKLTVDKSRWQQGNVFSCSVMHEALHNHYTQKSLSLSP

SEQ ID NO: 253 - protein, 328 aa, Homo sapiens
ASTKGPSVFPLAPSSKSTSGGTAALGCLVKDYFPEPVTVSWNSGALTSGVHTFPAVLQSSGLYSLSSVVTVPSSSLGTQTYICNVNHKPSNTKVDKKVEPKSCDKTHTCPPCPAPELLGGDSVFLFPPKPKDVLMISRTPEVTCVVVDVSHEDPEVKFNWYVDGVEVHNAKTKPREEQYNSTYRVVSVLPVLHQDWLNGKEYKCKVSNKALPAPIEKTISKAKGQPREPQVYTLPPSREEMTKNQVSLTCLVKGFYPSDIAVEWESNGQPENNYKTTPPVLDSDGSFFLYSKLTVDKSRWQQGNVFSCSVMHEALHNHYTQKSLSLSP

SEQ ID NO: 254 - protein, 328 aa, Homo sapiens
ASTKGPSVFPLAPSSKSTSGGTAALGCLVKDYFPEPVTVSWNSGALTSGVHTFPAVLQSSGLYSLSSVVTVPSSSLGTQTYICNVNHKPSNTKVDKKVEPKSCDKTHTCPPCPAPELLGGDSVFLFPPKPKDVLMISRTPEVTCVVVDVSHEDPEVKFNWYVDGVEVHNAKTKPREEQYNSTYRVVSVLPVLHQDWLNGKEYKCKVSNKALPKPIEKTISKAKGQPREPQVYTLPPSREEMTKNQVSLTCLVKGFYPSDIAVEWESNGQPENNYKTTPPVLDSDGSFFLYSKLTVDKSRWQQGNVFSCSVMHEALHNHYTQKSLSLSP

SEQ ID NO: 255 - protein, 328 aa, Homo sapiens
ASTKGPSVFPLAPSSKSTSGGTAALGCLVKDYFPEPVTVSWNSGALTSGVHTFPAVLQSSGLYSLSSVVTVPSSSLGTQTYICNVNHKPSNTKVDKKVEPKSCDKTHTCPPCPAPELLGGDSVFLFPPKPKDVLMISRTPEVTCVVIDVSHEDPEVKFNWYVDGVEVHNAKTKPREEQYNSTYRVVSVLPVLHQDWLNGKEYKCKVSNKALPKPIEKTISKAKGQPREPQVYTLPPSREEMTKNQVSLTCLVKGFYPSDIAVEWESNGQPENNYKTTPPVLDSDGSFFLYSKLTVDKSRWQQGNVFSCSVMHEALHNHYTQKSLSLSP

SEQ ID NO: 256 - protein, 328 aa, Homo sapiens
ASTKGPSVFPLAPSSKSTSGGTAALGCLVKDYFPEPVTVSWNSGALTSGVHTFPAVLQSSGLYSLSSVVTVPSSSLGTQTYICNVNHKPSNTKVDKKVEPKSCDKTHTCPPCPAPELLGGDSVFLFPPKPKDVLMISRTPEVTCVVVDVAHEDPEVKFNWYVDGVEVHNAKTKPREEQYNSTYRVVSVLPVLHQDWLNGKEYKCKVSNKALPKPIEKTISKAKGQPREPQVYTLPPSREEMTKNQVSLTCLVKGFYPSDIAVEWESNGQPENNYKTTPPVLDSDGSFFLYSKLTVDKSRWQQGNVFSCSVMHEALHNHYTQKSLSLSP

SEQ ID NO: 257 - protein, 328 aa, Homo sapiens
ASTKGPSVFPLAPSSKSTSGGTAALGCLVKDYFPEPVTVSWNSGALTSGVHTFPAVLQSSGLYSLSSVVTVPSSSLGTQTYICNVNHKPSNTKVDKKVEPKSCDKTHTCPPCPAPEYLGGDSVFLFPPKPKDVLMISRTPEVTCVVVDVSHEDPEVKFNWYVDGVEVHNAKTKPREEQYNSTYRVVSVLPVLHQDWLNGKEYKCKVSNKALPKPIEKTISKAKGQPREPQVYTLPPSREEMTKNQVSLTCLVKGFYPSDIAVEWESNGQPENNYKTTPPVLDSDGSFFLYSKLTVDKSRWQQGNVFSCSVMHEALHNHYTQKSLSLSP

SEQ ID NO: 258 - protein, 328 aa, Homo sapiens
ASTKGPSVFPLAPSSKSTSGGTAALGCLVKDYFPEPVTVSWNSGALTSGVHTFPAVLQSSGLYSLSSVVTVPSSSLGTQTYICNVNHKPSNTKVDKKVEPKSCDKTHTCPPCPAPEYLGGDSVFLFPPKPKDVLMISRTPEVTCVVVDVAHEDPEVKFNWYVDGVEVHNAKTKPREEQYNSTYRVVSVLPVLHQDWLNGKEYKCKVSNKALPKPIEKTISKAKGQPREPQVYTLPPSREEMTKNQVSLTCLVKGFYPSDIAVEWESNGQPENNYKTTPPVLDSDGSFFLYSKLTVDKSRWQQGNVFSCSVMHEALHNHYTQKSLSLSP

SEQ ID NO: 259 - protein, 328 aa, Homo sapiens
ASTKGPSVFPLAPSSKSTSGGTAALGCLVKDYFPEPVTVSWNSGALTSGVHTFPAVLQSSGLYSLSSVVTVPSSSLGTQTYICNVNHKPSNTKVDKKVEPKSCDKTHTCPPCPAPELLGGDSVFLFPPKPKDVLMISRTPEVTCVVIDVAHEDPEVKFNWYVDGVEVHNAKTKPREEQYNSTYRVVSVLPVLHQDWLNGKEYKCKVSNKALPKPIEKTISKAKGQPREPQVYTLPPSREEMTKNQVSLTCLVKGFYPSDIAVEWESNGQPENNYKTTPPVLDSDGSFFLYSKLTVDKSRWQQGNVFSCSVMHEALHNHYTQKSLSLSP

SEQ ID NO: 260 - protein, 328 aa, Homo sapiens
ASTKGPSVFPLAPSSKSTSGGTAALGCLVKDYFPEPVTVSWNSGALTSGVHTFPAVLQSSGLYSLSSVVTVPSSSLGTQTYICNVNHKPSNTKVDKKVEPKSCDKTHTCPPCPAPEYLGGDSVFLFPPKPKDVLMISRTPEVTCVVIDVSHEDPEVKFNWYVDGVEVHNAKTKPREEQYNSTYRVVSVLPVLHQDWLNGKEYKCKVSNKALPKPIEKTISKAKGQPREPQVYTLPPSREEMTKNQVSLTCLVKGFYPSDIAVEWESNGQPENNYKTTPPVLDSDGSFFLYSKLTVDKSRWQQGNVFSCSVMHEALHNHYTQKSLSLSP

SEQ ID NO: 261 - protein, 328 aa, Homo sapiens
ASTKGPSVFPLAPSSKSTSGGTAALGCLVKDYFPEPVTVSWNSGALTSGVHTFPAVLQSSGLYSLSSVVTVPSSSLGTQTYICNVNHKPSNTKVDKKVEPKSCDKTHTCPPCPAPEYLGGDSVFLFPPKPKDVLMISRTPEVTCVVIDVAHEDPEVKFNWYVDGVEVHNAKTKPREEQYNSTYRVVSVLPVLHQDWLNGKEYKCKVSNKALPKPIEKTISKAKGQPREPQVYTLPPSREEMTKNQVSLTCLVKGFYPSDIAVEWESNGQPENNYKTTPPVLDSDGSFFLYSKLTVDKSRWQQGNVFSCSVMHEALHNHYTQKSLSLSP

SEQ ID NO: 262 - protein, 328 aa, Homo sapiens
ASTKGPSVFPLAPSSKSTSGGTAALGCLVKDYFPEPVTVSWNSGALTSGVHTFPAVLQSSGLYSLSSVVTVPSSSLGTQTYICNVNHKPSNTKVDKKVEPKSCDKTHTCPPCPAPELLGGDSVFLFPPKPKDVLMISRTPEVTCVVVDVSHEDPEVKFNWYVDGVEVHNAKTKPREEQYNSTYRVVSVLPVLHRDWLNGKEYKCKVSNKALPKPIEKTISKAKGQRREPQVYTLPPSREEMTKNQVSLTCLVKGFYPSDIAVEWESNGQPENNYKTTPPVLDSDGSFFLYSKLTVDKSRWQQGNVFSCSVMHEALHNHYTQKSLSLSP

SEQ ID NO: 263 - protein, 328 aa, Homo sapiens
ASTKGPSVFPLAPSSKSTSGGTAALGCLVKDYFPEPVTVSWNSGALTSGVHTFPAVLQSSGLYSLSSVVTVPSSSLGTQTYICNVNHKPSNTKVDKKVEPKSCDKTHTCPPCPAPELLGGDSVFLFPPKPKDVLMISRTPEVTCVVVDVSHEDPEVKFNWYVDGVEVHNAKTKPREEQYNSTYRVVSVLPVLHRDWLNGKEYKCKVSNKALPKPIEKTISKAKGQPREPQVYTLPPSREEMTKNQVSLTCLVKGFYPSDIAVEWESNGQPENNYKTTPPVLDSDGSFFLYSKLTVKKSRWQQGNVFSCSVMHEALHNHYTQKSLSLSP

SEQ ID NO: 264 - protein, 328 aa, Homo sapiens
ASTKGPSVFPLAPSSKSTSGGTAALGCLVKDYFPEPVTVSWNSGALTSGVHTFPAVLQSSGLYSLSSVVTVPSSSLGTQTYICNVNHKPSNTKVDKKVEPKSCDKTHTCPPCPAPELLGGDSVFLFPPKPKDVLMISRTPEVTCVVIDVSHEDPEVKFNWYVDGVEVHNAKTKPREEQYNSTYRVVSVLPVLHRDWLNGKEYKCKVSNKALPKPIEKTISKAKGQRREPQVYTLPPSREEMTKNQVSLTCLVKGFYPSDIAVEWESNGQPENNYKTTPPVLDSDGSFFLYSKLTVDKSRWQQGNVFSCSVMHEALHNHYTQKSLSLSP

SEQ ID NO: 265 - protein, 328 aa, Homo sapiens
ASTKGPSVFPLAPSSKSTSGGTAALGCLVKDYFPEPVTVSWNSGALTSGVHTFPAVLQSSGLYSLSSVVTVPSSSLGTQTYICNVNHKPSNTKVDKKVEPKSCDKTHTCPPCPAPELLGGDSVFLFPPKPKDVLMISRTPEVTCVVIDVSHEDPEVKFNWYVDGVEVHNAKTKPREEQYNSTYRVVSVLPVLHRDWLNGKEYKCKVSNKALPKPIEKTISKAKGQPREPQVYTLPPSREEMTKNQVSLTCLVKGFYPSDIAVEWESNGQPENNYKTTPPVLDSDGSFFLYSKLTVKKSRWQQGNVFSCSVMHEALHNHYTQKSLSLSP

SEQ ID NO: 266 - protein, 328 aa, Homo sapiens
ASTKGPSVFPLAPSSKSTSGGTAALGCLVKDYFPEPVTVSWNSGALTSGVHTFPAVLQSSGLYSLSSVVTVPSSSLGTQTYICNVNHKPSNTKVDKKVEPKSCDKTHTCPPCPAPELLGGDSVFLFPPKPKDVLMISRTPEVTCVVVDVAHEDPEVKFNWYVDGVEVHNAKTKPREEQYNSTYRVVSVLPVLHRDWLNGKEYKCKVSNKALPKPIEKTISKAKGQRREPQVYTLPPSREEMTKNQVSLTCLVKGFYPSDIAVEWESNGQPENNYKTTPPVLDSDGSFFLYSKLTVDKSRWQQGNVFSCSVMHEALHNHYTQKSLSLSP

SEQ ID NO: 267 - protein, 328 aa, Homo sapiens
ASTKGPSVFPLAPSSKSTSGGTAALGCLVKDYFPEPVTVSWNSGALTSGVHTFPAVLQSSGLYSLSSVVTVPSSSLGTQTYICNVNHKPSNTKVDKKVEPKSCDKTHTCPPCPAPELLGGDSVFLFPPKPKDVLMISRTPEVTCVVVDVAHEDPEVKFNWYVDGVEVHNAKTKPREEQYNSTYRVVSVLPVLHRDWLNGKEYKCKVSNKALPKPIEKTISKAKGQPREPQVYTLPPSREEMTKNQVSLTCLVKGFYPSDIAVEWESNGQPENNYKTTPPVLDSDGSFFLYSKLTVKKSRWQQGNVFSCSVMHEALHNHYTQKSLSLSP

SEQ ID NO: 268 - protein, 328 aa, Homo sapiens
ASTKGPSVFPLAPSSKSTSGGTAALGCLVKDYFPEPVTVSWNSGALTSGVHTFPAVLQSSGLYSLSSVVTVPSSSLGTQTYICNVNHKPSNTKVDKKVEPKSCDKTHTCPPCPAPEYLGGDSVFLFPPKPKDVLMISRTPEVTCVVVDVSHEDPEVKFNWYVDGVEVHNAKTKPREEQYNSTYRVVSVLPVLHRDWLNGKEYKCKVSNKALPKPIEKTISKAKGQRREPQVYTLPPSREEMTKNQVSLTCLVKGFYPSDIAVEWESNGQPENNYKTTPPVLDSDGSFFLYSKLTVDKSRWQQGNVFSCSVMHEALHNHYTQKSLSLSP

SEQ ID NO: 269 - protein, 328 aa, Homo sapiens
ASTKGPSVFPLAPSSKSTSGGTAALGCLVKDYFPEPVTVSWNSGALTSGVHTFPAVLQSSGLYSLSSVVTVPSSSLGTQTYICNVNHKPSNTKVDKKVEPKSCDKTHTCPPCPAPEYLGGDSVFLFPPKPKDVLMISRTPEVTCVVVDVSHEDPEVKFNWYVDGVEVHNAKTKPREEQYNSTYRVVSVLPVLHRDWLNGKEYKCKVSNKALPKPIEKTISKAKGQPREPQVYTLPPSREEMTKNQVSLTCLVKGFYPSDIAVEWESNGQPENNYKTTPPVLDSDGSFFLYSKLTVKKSRWQQGNVFSCSVMHEALHNHYTQKSLSLSP

SEQ ID NO: 270 - protein, 328 aa, Homo sapiens
ASTKGPSVFPLAPSSKSTSGGTAALGCLVKDYFPEPVTVSWNSGALTSGVHTFPAVLQSSGLYSLSSVVTVPSSSLGTQTYICNVNHKPSNTKVDKKVEPKSCDKTHTCPPCPAPEYLGGDSVFLFPPKPKDVLMISRTPEVTCVVVDVAHEDPEVKFNWYVDGVEVHNAKTKPREEQYNSTYRVVSVLPVLHRDWLNGKEYKCKVSNKALPKPIEKTISKAKGQRREPQVYTLPPSREEMTKNQVSLTCLVKGFYPSDIAVEWESNGQPENNYKTTPPVLDSDGSFFLYSKLTVDKSRWQQGNVFSCSVMHEALHNHYTQKSLSLSP

SEQ ID NO: 271 - protein, 328 aa, Homo sapiens
ASTKGPSVFPLAPSSKSTSGGTAALGCLVKDYFPEPVTVSWNSGALTSGVHTFPAVLQSSGLYSLSSVVTVPSSSLGTQTYICNVNHKPSNTKVDKKVEPKSCDKTHTCPPCPAPEYLGGDSVFLFPPKPKDVLMISRTPEVTCVVVDVAHEDPEVKFNWYVDGVEVHNAKTKPREEQYNSTYRVVSVLPVLHRDWLNGKEYKCKVSNKALPKPIEKTISKAKGQPREPQVYTLPPSREEMTKNQVSLTCLVKGFYPSDIAVEWESNGQPENNYKTTPPVLDSDGSFFLYSKLTVKKSRWQQGNVFSCSVMHEALHNHYTQKSLSLSP

SEQ ID NO: 272 - protein, 328 aa, Homo sapiens
ASTKGPSVFPLAPSSKSTSGGTAALGCLVKDYFPEPVTVSWNSGALTSGVHTFPAVLQSSGLYSLSSVVTVPSSSLGTQTYICNVNHKPSNTKVDKKVEPKSCDKTHTCPPCPAPELLGGDSVFLFPPKPKDVLMISRTPEVTCVVIDVAHEDPEVKFNWYVDGVEVHNAKTKPREEQYNSTYRVVSVLPVLHRDWLNGKEYKCKVSNKALPKPIEKTISKAKGQRREPQVYTLPPSREEMTKNQVSLTCLVKGFYPSDIAVEWESNGQPENNYKTTPPVLDSDGSFFLYSKLTVDKSRWQQGNVFSCSVMHEALHNHYTQKSLSLSP

SEQ ID NO: 273 - protein, 328 aa, Homo sapiens
ASTKGPSVFPLAPSSKSTSGGTAALGCLVKDYFPEPVTVSWNSGALTSGVHTFPAVLQSSGLYSLSSVVTVPSSSLGTQTYICNVNHKPSNTKVDKKVEPKSCDKTHTCPPCPAPELLGGDSVFLFPPKPKDVLMISRTPEVTCVVIDVAHEDPEVKFNWYVDGVEVHNAKTKPREEQYNSTYRVVSVLPVLHRDWLNGKEYKCKVSNKALPKPIEKTISKAKGQPREPQVYTLPPSREEMTKNQVSLTCLVKGFYPSDIAVEWESNGQPENNYKTTPPVLDSDGSFFLYSKLTVKKSRWQQGNVFSCSVMHEALHNHYTQKSLSLSP

SEQ ID NO: 274 - protein, 328 aa, Homo sapiens
ASTKGPSVFPLAPSSKSTSGGTAALGCLVKDYFPEPVTVSWNSGALTSGVHTFPAVLQSSGLYSLSSVVTVPSSSLGTQTYICNVNHKPSNTKVDKKVEPKSCDKTHTCPPCPAPEYLGGDSVFLFPPKPKDVLMISRTPEVTCVVIDVSHEDPEVKFNWYVDGVEVHNAKTKPREEQYNSTYRVVSVLPVLHRDWLNGKEYKCKVSNKALPKPIEKTISKAKGQRREPQVYTLPPSREEMTKNQVSLTCLVKGFYPSDIAVEWESNGQPENNYKTTPPVLDSDGSFFLYSKLTVDKSRWQQGNVFSCSVMHEALHNHYTQKSLSLSP

SEQ ID NO: 275 - protein, 328 aa, Homo sapiens
ASTKGPSVFPLAPSSKSTSGGTAALGCLVKDYFPEPVTVSWNSGALTSGVHTFPAVLQSSGLYSLSSVVTVPSSSLGTQTYICNVNHKPSNTKVDKKVEPKSCDKTHTCPPCPAPEYLGGDSVFLFPPKPKDVLMISRTPEVTCVVIDVSHEDPEVKFNWYVDGVEVHNAKTKPREEQYNSTYRVVSVLPVLHRDWLNGKEYKCKVSNKALPKPIEKTISKAKGQPREPQVYTLPPSREEMTKNQVSLTCLVKGFYPSDIAVEWESNGQPENNYKTTPPVLDSDGSFFLYSKLTVKKSRWQQGNVFSCSVMHEALHNHYTQKSLSLSP

SEQ ID NO: 276 - protein, 328 aa, Homo sapiens
ASTKGPSVFPLAPSSKSTSGGTAALGCLVKDYFPEPVTVSWNSGALTSGVHTFPAVLQSSGLYSLSSVVTVPSSSLGTQTYICNVNHKPSNTKVDKKVEPKSCDKTHTCPPCPAPEYLGGDSVFLFPPKPKDVLMISRTPEVTCVVIDVAHEDPEVKFNWYVDGVEVHNAKTKPREEQYNSTYRVVSVLPVLHRDWLNGKEYKCKVSNKALPKPIEKTISKAKGQRREPQVYTLPPSREEMTKNQVSLTCLVKGFYPSDIAVEWESNGQPENNYKTTPPVLDSDGSFFLYSKLTVDKSRWQQGNVFSCSVMHEALHNHYTQKSLSLSP

SEQ ID NO: 277 - protein, 328 aa, Homo sapiens
ASTKGPSVFPLAPSSKSTSGGTAALGCLVKDYFPEPVTVSWNSGALTSGVHTFPAVLQSSGLYSLSSVVTVPSSSLGTQTYICNVNHKPSNTKVDKKVEPKSCDKTHTCPPCPAPEYLGGDSVFLFPPKPKDVLMISRTPEVTCVVIDVAHEDPEVKFNWYVDGVEVHNAKTKPREEQYNSTYRVVSVLPVLHRDWLNGKEYKCKVSNKALPKPIEKTISKAKGQPREPQVYTLPPSREEMTKNQVSLTCLVKGFYPSDIAVEWESNGQPENNYKTTPPVLDSDGSFFLYSKLTVKKSRWQQGNVFSCSVMHEALHNHYTQKSLSLSP

SEQ ID NO: 278 - protein, 328 aa, Homo sapiens
ASTKGPSVFPLAPSSKSTSGGTAALGCLVKDYFPEPVTVSWNSGALTSGVHTFPAVLQSSGLYSLSSVVTVPSSSLGTQTYICNVNHKPSNTKVDKKVEPKSCDKTHTCPPCPAPELLGGDSVFLFPPKPKDTLMISRTPEVTCVVVDVSHEDPEVKFNWYVDGVEVHNAKTKPREEQYNSTYRVVSVLTVLHQDWLNGKEYKCKVSNKALPAPIEKTISKAKGQPREPQVYTLPPSREEMTKNQVSLTCLVKGFYPSDIAVEWESNGQPENNYKTTPPVLDSDGSFFLYSKLTVDKSRWQQGNVFSCSVMHEALHAHYTRKELSLSP

SEQ ID NO: 279 - protein, 328 aa, Homo sapiens
ASTKGPSVFPLAPSSKSTSGGTAALGCLVKDYFPEPVTVSWNSGALTSGVHTFPAVLQSSGLYSLSSVVTVPSSSLGTQTYICNVNHKPSNTKVDKKVEPKSCDKTHTCPPCPAPELLGGDSVFLFPPKPKDVLMISRTPEVTCVVVDVSHEDPEVKFNWYVDGVEVHNAKTKPREEQYNSTYRVVSVLPVLHQDWLNGKEYKCKVSNKALPAPIEKTISKAKGQPREPQVYTLPPSREEMTKNQVSLTCLVKGFYPSDIAVEWESNGQPENNYKTTPPVLDSDGSFFLYSKLTVDKSRWQQGNVFSCSVMHEALHAHYTRKELSLSP

SEQ ID NO: 280 - protein, 328 aa, Homo sapiens
ASTKGPSVFPLAPSSKSTSGGTAALGCLVKDYFPEPVTVSWNSGALTSGVHTFPAVLQSSGLYSLSSVVTVPSSSLGTQTYICNVNHKPSNTKVDKKVEPKSCDKTHTCPPCPAPELLGGDSVFLFPPKPKDVLMISRTPEVTCVVVDVSHEDPEVKFNWYVDGVEVHNAKTKPREEQYNSTYRVVSVLPVLHQDWLNGKEYKCKVSNKALPKPIEKTISKAKGQPREPQVYTLPPSREEMTKNQVSLTCLVKGFYPSDIAVEWESNGQPENNYKTTPPVLDSDGSFFLYSKLTVDKSRWQQGNVFSCSVMHEALHAHYTRKELSLSP

SEQ ID NO: 281 - protein, 328 aa, Homo sapiens
ASTKGPSVFPLAPSSKSTSGGTAALGCLVKDYFPEPVTVSWNSGALTSGVHTFPAVLQSSGLYSLSSVVTVPSSSLGTQTYICNVNHKPSNTKVDKKVEPKSCDKTHTCPPCPAPELLGGDSVFLFPPKPKDVLMISRTPEVTCVVIDVSHEDPEVKFNWYVDGVEVHNAKTKPREEQYNSTYRVVSVLPVLHQDWLNGKEYKCKVSNKALPKPIEKTISKAKGQPREPQVYTLPPSREEMTKNQVSLTCLVKGFYPSDIAVEWESNGQPENNYKTTPPVLDSDGSFFLYSKLTVDKSRWQQGNVFSCSVMHEALHAHYTRKELSLSP

SEQ ID NO: 282 - protein, 328 aa, Homo sapiens
ASTKGPSVFPLAPSSKSTSGGTAALGCLVKDYFPEPVTVSWNSGALTSGVHTFPAVLQSSGLYSLSSVVTVPSSSLGTQTYICNVNHKPSNTKVDKKVEPKSCDKTHTCPPCPAPELLGGDSVFLFPPKPKDVLMISRTPEVTCVVVDVAHEDPEVKFNWYVDGVEVHNAKTKPREEQYNSTYRVVSVLPVLHQDWLNGKEYKCKVSNKALPKPIEKTISKAKGQPREPQVYTLPPSREEMTKNQVSLTCLVKGFYPSDIAVEWESNGQPENNYKTTPPVLDSDGSFFLYSKLTVDKSRWQQGNVFSCSVMHEALHAHYTRKELSLSP

SEQ ID NO: 283 - protein, 328 aa, Homo sapiens
ASTKGPSVFPLAPSSKSTSGGTAALGCLVKDYFPEPVTVSWNSGALTSGVHTFPAVLQSSGLYSLSSVVTVPSSSLGTQTYICNVNHKPSNTKVDKKVEPKSCDKTHTCPPCPAPEYLGGDSVFLFPPKPKDVLMISRTPEVTCVVVDVSHEDPEVKFNWYVDGVEVHNAKTKPREEQYNSTYRVVSVLPVLHQDWLNGKEYKCKVSNKALPKPIEKTISKAKGQPREPQVYTLPPSREEMTKNQVSLTCLVKGFYPSDIAVEWESNGQPENNYKTTPPVLDSDGSFFLYSKLTVDKSRWQQGNVFSCSVMHEALHAHYTRKELSLSP

SEQ ID NO: 284 - protein, 328 aa, Homo sapiens
ASTKGPSVFPLAPSSKSTSGGTAALGCLVKDYFPEPVTVSWNSGALTSGVHTFPAVLQSSGLYSLSSVVTVPSSSLGTQTYICNVNHKPSNTKVDKKVEPKSCDKTHTCPPCPAPEYLGGDSVFLFPPKPKDVLMISRTPEVTCVVVDVAHEDPEVKFNWYVDGVEVHNAKTKPREEQYNSTYRVVSVLPVLHQDWLNGKEYKCKVSNKALPKPIEKTISKAKGQPREPQVYTLPPSREEMTKNQVSLTCLVKGFYPSDIAVEWESNGQPENNYKTTPPVLDSDGSFFLYSKLTVDKSRWQQGNVFSCSVMHEALHAHYTRKELSLSP

SEQ ID NO: 285 - protein, 328 aa, Homo sapiens
ASTKGPSVFPLAPSSKSTSGGTAALGCLVKDYFPEPVTVSWNSGALTSGVHTFPAVLQSSGLYSLSSVVTVPSSSLGTQTYICNVNHKPSNTKVDKKVEPKSCDKTHTCPPCPAPELLGGDSVFLFPPKPKDVLMISRTPEVTCVVIDVAHEDPEVKFNWYVDGVEVHNAKTKPREEQYNSTYRVVSVLPVLHQDWLNGKEYKCKVSNKALPKPIEKTISKAKGQPREPQVYTLPPSREEMTKNQVSLTCLVKGFYPSDIAVEWESNGQPENNYKTTPPVLDSDGSFFLYSKLTVDKSRWQQGNVFSCSVMHEALHAHYTRKELSLSP

SEQ ID NO: 286 - protein, 328 aa, Homo sapiens
ASTKGPSVFPLAPSSKSTSGGTAALGCLVKDYFPEPVTVSWNSGALTSGVHTFPAVLQSSGLYSLSSVVTVPSSSLGTQTYICNVNHKPSNTKVDKKVEPKSCDKTHTCPPCPAPEYLGGDSVFLFPPKPKDVLMISRTPEVTCVVIDVSHEDPEVKFNWYVDGVEVHNAKTKPREEQYNSTYRVVSVLPVLHQDWLNGKEYKCKVSNKALPKPIEKTISKAKGQPREPQVYTLPPSREEMTKNQVSLTCLVKGFYPSDIAVEWESNGQPENNYKTTPPVLDSDGSFFLYSKLTVDKSRWQQGNVFSCSVMHEALHAHYTRKELSLSP

SEQ ID NO: 287 - protein, 328 aa, Homo sapiens
ASTKGPSVFPLAPSSKSTSGGTAALGCLVKDYFPEPVTVSWNSGALTSGVHTFPAVLQSSGLYSLSSVVTVPSSSLGTQTYICNVNHKPSNTKVDKKVEPKSCDKTHTCPPCPAPEYLGGDSVFLFPPKPKDVLMISRTPEVTCVVIDVAHEDPEVKFNWYVDGVEVHNAKTKPREEQYNSTYRVVSVLPVLHQDWLNGKEYKCKVSNKALPKPIEKTISKAKGQPREPQVYTLPPSREEMTKNQVSLTCLVKGFYPSDIAVEWESNGQPENNYKTTPPVLDSDGSFFLYSKLTVDKSRWQQGNVFSCSVMHEALHAHYTRKELSLSP

SEQ ID NO: 288 - protein, 328 aa, Homo sapiens
ASTKGPSVFPLAPSSKSTSGGTAALGCLVKDYFPEPVTVSWNSGALTSGVHTFPAVLQSSGLYSLSSVVTVPSSSLGTQTYICNVNHKPSNTKVDKKVEPKSCDKTHTCPPCPAPELLGGDSVFLFPPKPKDVLMISRTPEVTCVVVDVSHEDPEVKFNWYVDGVEVHNAKTKPREEQYNSTYRVVSVLPVLHRDWLNGKEYKCKVSNKALPKPIEKTISKAKGQRREPQVYTLPPSREEMTKNQVSLTCLVKGFYPSDIAVEWESNGQPENNYKTTPPVLDSDGSFFLYSKLTVDKSRWQQGNVFSCSVMHEALHAHYTRKELSLSP

SEQ ID NO: 289 - protein, 328 aa, Homo sapiens
ASTKGPSVFPLAPSSKSTSGGTAALGCLVKDYFPEPVTVSWNSGALTSGVHTFPAVLQSSGLYSLSSVVTVPSSSLGTQTYICNVNHKPSNTKVDKKVEPKSCDKTHTCPPCPAPELLGGDSVFLFPPKPKDVLMISRTPEVTCVVVDVSHEDPEVKFNWYVDGVEVHNAKTKPREEQYNSTYRVVSVLPVLHRDWLNGKEYKCKVSNKALPKPIEKTISKAKGQPREPQVYTLPPSREEMTKNQVSLTCLVKGFYPSDIAVEWESNGQPENNYKTTPPVLDSDGSFFLYSKLTVKKSRWQQGNVFSCSVMHEALHAHYTRKELSLSP

SEQ ID NO: 290 - protein, 328 aa, Homo sapiens
ASTKGPSVFPLAPSSKSTSGGTAALGCLVKDYFPEPVTVSWNSGALTSGVHTFPAVLQSSGLYSLSSVVTVPSSSLGTQTYICNVNHKPSNTKVDKKVEPKSCDKTHTCPPCPAPELLGGDSVFLFPPKPKDVLMISRTPEVTCVVIDVSHEDPEVKFNWYVDGVEVHNAKTKPREEQYNSTYRVVSVLPVLHRDWLNGKEYKCKVSNKALPKPIEKTISKAKGQRREPQVYTLPPSREEMTKNQVSLTCLVKGFYPSDIAVEWESNGQPENNYKTTPPVLDSDGSFFLYSKLTVDKSRWQQGNVFSCSVMHEALHAHYTRKELSLSP

SEQ ID NO: 291 - protein, 328 aa, Homo sapiens
ASTKGPSVFPLAPSSKSTSGGTAALGCLVKDYFPEPVTVSWNSGALTSGVHTFPAVLQSSGLYSLSSVVTVPSSSLGTQTYICNVNHKPSNTKVDKKVEPKSCDKTHTCPPCPAPELLGGDSVFLFPPKPKDVLMISRTPEVTCVVIDVSHEDPEVKFNWYVDGVEVHNAKTKPREEQYNSTYRVVSVLPVLHRDWLNGKEYKCKVSNKALPKPIEKTISKAKGQPREPQVYTLPPSREEMTKNQVSLTCLVKGFYPSDIAVEWESNGQPENNYKTTPPVLDSDGSFFLYSKLTVKKSRWQQGNVFSCSVMHEALHAHYTRKELSLSP

SEQ ID NO: 292 - protein, 328 aa, Homo sapiens
ASTKGPSVFPLAPSSKSTSGGTAALGCLVKDYFPEPVTVSWNSGALTSGVHTFPAVLQSSGLYSLSSVVTVPSSSLGTQTYICNVNHKPSNTKVDKKVEPKSCDKTHTCPPCPAPELLGGDSVFLFPPKPKDVLMISRTPEVTCVVVDVAHEDPEVKFNWYVDGVEVHNAKTKPREEQYNSTYRVVSVLPVLHRDWLNGKEYKCKVSNKALPKPIEKTISKAKGQRREPQVYTLPPSREEMTKNQVSLTCLVKGFYPSDIAVEWESNGQPENNYKTTPPVLDSDGSFFLYSKLTVDKSRWQQGNVFSCSVMHEALHAHYTRKELSLSP

SEQ ID NO: 293 - protein, 328 aa, Homo sapiens
ASTKGPSVFPLAPSSKSTSGGTAALGCLVKDYFPEPVTVSWNSGALTSGVHTFPAVLQSSGLYSLSSVVTVPSSSLGTQTYICNVNHKPSNTKVDKKVEPKSCDKTHTCPPCPAPELLGGDSVFLFPPKPKDVLMISRTPEVTCVVVDVAHEDPEVKFNWYVDGVEVHNAKTKPREEQYNSTYRVVSVLPVLHRDWLNGKEYKCKVSNKALPKPIEKTISKAKGQPREPQVYTLPPSREEMTKNQVSLTCLVKGFYPSDIAVEWESNGQPENNYKTTPPVLDSDGSFFLYSKLTVKKSRWQQGNVFSCSVMHEALHAHYTRKELSLSP

SEQ ID NO: 294 - protein, 328 aa, Homo sapiens
ASTKGPSVFPLAPSSKSTSGGTAALGCLVKDYFPEPVTVSWNSGALTSGVHTFPAVLQSSGLYSLSSVVTVPSSSLGTQTYICNVNHKPSNTKVDKKVEPKSCDKTHTCPPCPAPEYLGGDSVFLFPPKPKDVLMISRTPEVTCVVVDVSHEDPEVKFNWYVDGVEVHNAKTKPREEQYNSTYRVVSVLPVLHRDWLNGKEYKCKVSNKALPKPIEKTISKAKGQRREPQVYTLPPSREEMTKNQVSLTCLVKGFYPSDIAVEWESNGQPENNYKTTPPVLDSDGSFFLYSKLTVDKSRWQQGNVFSCSVMHEALHAHYTRKELSLSP

SEQ ID NO: 295 - protein, 328 aa, Homo sapiens
ASTKGPSVFPLAPSSKSTSGGTAALGCLVKDYFPEPVTVSWNSGALTSGVHTFPAVLQSSGLYSLSSVVTVPSSSLGTQTYICNVNHKPSNTKVDKKVEPKSCDKTHTCPPCPAPEYLGGDSVFLFPPKPKDVLMISRTPEVTCVVVDVSHEDPEVKFNWYVDGVEVHNAKTKPREEQYNSTYRVVSVLPVLHRDWLNGKEYKCKVSNKALPKPIEKTISKAKGQPREPQVYTLPPSREEMTKNQVSLTCLVKGFYPSDIAVEWESNGQPENNYKTTPPVLDSDGSFFLYSKLTVKKSRWQQGNVFSCSVMHEALHAHYTRKELSLSP

SEQ ID NO: 296 - protein, 328 aa, Homo sapiens
ASTKGPSVFPLAPSSKSTSGGTAALGCLVKDYFPEPVTVSWNSGALTSGVHTFPAVLQSSGLYSLSSVVTVPSSSLGTQTYICNVNHKPSNTKVDKKVEPKSCDKTHTCPPCPAPEYLGGDSVFLFPPKPKDVLMISRTPEVTCVVVDVAHEDPEVKFNWYVDGVEVHNAKTKPREEQYNSTYRVVSVLPVLHRDWLNGKEYKCKVSNKALPKPIEKTISKAKGQRREPQVYTLPPSREEMTKNQVSLTCLVKGFYPSDIAVEWESNGQPENNYKTTPPVLDSDGSFFLYSKLTVDKSRWQQGNVFSCSVMHEALHAHYTRKELSLSP

SEQ ID NO: 297 - protein, 328 aa, Homo sapiens
ASTKGPSVFPLAPSSKSTSGGTAALGCLVKDYFPEPVTVSWNSGALTSGVHTFPAVLQSSGLYSLSSVVTVPSSSLGTQTYICNVNHKPSNTKVDKKVEPKSCDKTHTCPPCPAPEYLGGDSVFLFPPKPKDVLMISRTPEVTCVVVDVAHEDPEVKFNWYVDGVEVHNAKTKPREEQYNSTYRVVSVLPVLHRDWLNGKEYKCKVSNKALPKPIEKTISKAKGQPREPQVYTLPPSREEMTKNQVSLTCLVKGFYPSDIAVEWESNGQPENNYKTTPPVLDSDGSFFLYSKLTVKKSRWQQGNVFSCSVMHEALHAHYTRKELSLSP

SEQ ID NO: 298 - protein, 328 aa, Homo sapiens
ASTKGPSVFPLAPSSKSTSGGTAALGCLVKDYFPEPVTVSWNSGALTSGVHTFPAVLQSSGLYSLSSVVTVPSSSLGTQTYICNVNHKPSNTKVDKKVEPKSCDKTHTCPPCPAPELLGGDSVFLFPPKPKDVLMISRTPEVTCVVIDVAHEDPEVKFNWYVDGVEVHNAKTKPREEQYNSTYRVVSVLPVLHRDWLNGKEYKCKVSNKALPKPIEKTISKAKGQRREPQVYTLPPSREEMTKNQVSLTCLVKGFYPSDIAVEWESNGQPENNYKTTPPVLDSDGSFFLYSKLTVDKSRWQQGNVFSCSVMHEALHAHYTRKELSLSP

SEQ ID NO: 299 - protein, 328 aa, Homo sapiens
ASTKGPSVFPLAPSSKSTSGGTAALGCLVKDYFPEPVTVSWNSGALTSGVHTFPAVLQSSGLYSLSSVVTVPSSSLGTQTYICNVNHKPSNTKVDKKVEPKSCDKTHTCPPCPAPELLGGDSVFLFPPKPKDVLMISRTPEVTCVVIDVAHEDPEVKFNWYVDGVEVHNAKTKPREEQYNSTYRVVSVLPVLHRDWLNGKEYKCKVSNKALPKPIEKTISKAKGQPREPQVYTLPPSREEMTKNQVSLTCLVKGFYPSDIAVEWESNGQPENNYKTTPPVLDSDGSFFLYSKLTVKKSRWQQGNVFSCSVMHEALHAHYTRKELSLSP

SEQ ID NO: 300 - protein, 328 aa, Homo sapiens
ASTKGPSVFPLAPSSKSTSGGTAALGCLVKDYFPEPVTVSWNSGALTSGVHTFPAVLQSSGLYSLSSVVTVPSSSLGTQTYICNVNHKPSNTKVDKKVEPKSCDKTHTCPPCPAPEYLGGDSVFLFPPKPKDVLMISRTPEVTCVVIDVSHEDPEVKFNWYVDGVEVHNAKTKPREEQYNSTYRVVSVLPVLHRDWLNGKEYKCKVSNKALPKPIEKTISKAKGQRREPQVYTLPPSREEMTKNQVSLTCLVKGFYPSDIAVEWESNGQPENNYKTTPPVLDSDGSFFLYSKLTVDKSRWQQGNVFSCSVMHEALHAHYTRKELSLSP

SEQ ID NO: 301 - protein, 328 aa, Homo sapiens
ASTKGPSVFPLAPSSKSTSGGTAALGCLVKDYFPEPVTVSWNSGALTSGVHTFPAVLQSSGLYSLSSVVTVPSSSLGTQTYICNVNHKPSNTKVDKKVEPKSCDKTHTCPPCPAPEYLGGDSVFLFPPKPKDVLMISRTPEVTCVVIDVSHEDPEVKFNWYVDGVEVHNAKTKPREEQYNSTYRVVSVLPVLHRDWLNGKEYKCKVSNKALPKPIEKTISKAKGQPREPQVYTLPPSREEMTKNQVSLTCLVKGFYPSDIAVEWESNGQPENNYKTTPPVLDSDGSFFLYSKLTVKKSRWQQGNVFSCSVMHEALHAHYTRKELSLSP

SEQ ID NO: 302 - protein, 328 aa, Homo sapiens
ASTKGPSVFPLAPSSKSTSGGTAALGCLVKDYFPEPVTVSWNSGALTSGVHTFPAVLQSSGLYSLSSVVTVPSSSLGTQTYICNVNHKPSNTKVDKKVEPKSCDKTHTCPPCPAPEYLGGDSVFLFPPKPKDVLMISRTPEVTCVVIDVAHEDPEVKFNWYVDGVEVHNAKTKPREEQYNSTYRVVSVLPVLHRDWLNGKEYKCKVSNKALPKPIEKTISKAKGQRREPQVYTLPPSREEMTKNQVSLTCLVKGFYPSDIAVEWESNGQPENNYKTTPPVLDSDGSFFLYSKLTVDKSRWQQGNVFSCSVMHEALHAHYTRKELSLSP

SEQ ID NO: 303 - protein, 328 aa, Homo sapiens
ASTKGPSVFPLAPSSKSTSGGTAALGCLVKDYFPEPVTVSWNSGALTSGVHTFPAVLQSSGLYSLSSVVTVPSSSLGTQTYICNVNHKPSNTKVDKKVEPKSCDKTHTCPPCPAPEYLGGDSVFLFPPKPKDVLMISRTPEVTCVVIDVAHEDPEVKFNWYVDGVEVHNAKTKPREEQYNSTYRVVSVLPVLHRDWLNGKEYKCKVSNKALPKPIEKTISKAKGQPREPQVYTLPPSREEMTKNQVSLTCLVKGFYPSDIAVEWESNGQPENNYKTTPPVLDSDGSFFLYSKLTVKKSRWQQGNVFSCSVMHEALHAHYTRKELSLSP

SEQ ID NO: 304 - protein, 328 aa, Homo sapiens
ASTKGPSVFPLAPSSKSTSGGTAALGCLVKDYFPEPVTVSWNSGALTSGVHTFPAVLQSSGLYSLSSVVTVPSSSLGTQTYICNVNHKPSNTKVDKKVEPKSCDKTHTCPPCPAPELLGGDSVFLFPPKPKDTLMISRTPEVTCVVVDVSHEDPEVKFNWYVDGVEVHNAKTKPREEQYNSTYRVVSVLTVLHQDWLNGKEYKCKVSNKALPAPIEKTISKAKGQPREPQVYTLPPSREEMTKNQVSLTCLVKGFYPSDIAVEWESNGQPENNYKTTPPVLDSDGSFFLYSKLTVDKSRWQQGNVFSCSVMHEALHAHTTRKELSLSP

SEQ ID NO: 305 - protein, 328 aa, Homo sapiens
ASTKGPSVFPLAPSSKSTSGGTAALGCLVKDYFPEPVTVSWNSGALTSGVHTFPAVLQSSGLYSLSSVVTVPSSSLGTQTYICNVNHKPSNTKVDKKVEPKSCDKTHTCPPCPAPELLGGDSVFLFPPKPKDVLMISRTPEVTCVVVDVSHEDPEVKFNWYVDGVEVHNAKTKPREEQYNSTYRVVSVLPVLHQDWLNGKEYKCKVSNKALPAPIEKTISKAKGQPREPQVYTLPPSREEMTKNQVSLTCLVKGFYPSDIAVEWESNGQPENNYKTTPPVLDSDGSFFLYSKLTVDKSRWQQGNVFSCSVMHEALHAHTTRKELSLSP

SEQ ID NO: 306 - protein, 328 aa, Homo sapiens
ASTKGPSVFPLAPSSKSTSGGTAALGCLVKDYFPEPVTVSWNSGALTSGVHTFPAVLQSSGLYSLSSVVTVPSSSLGTQTYICNVNHKPSNTKVDKKVEPKSCDKTHTCPPCPAPELLGGDSVFLFPPKPKDVLMISRTPEVTCVVVDVSHEDPEVKFNWYVDGVEVHNAKTKPREEQYNSTYRVVSVLPVLHQDWLNGKEYKCKVSNKALPKPIEKTISKAKGQPREPQVYTLPPSREEMTKNQVSLTCLVKGFYPSDIAVEWESNGQPENNYKTTPPVLDSDGSFFLYSKLTVDKSRWQQGNVFSCSVMHEALHAHTTRKELSLSP

SEQ ID NO: 307 - protein, 328 aa, Homo sapiens
ASTKGPSVFPLAPSSKSTSGGTAALGCLVKDYFPEPVTVSWNSGALTSGVHTFPAVLQSSGLYSLSSVVTVPSSSLGTQTYICNVNHKPSNTKVDKKVEPKSCDKTHTCPPCPAPELLGGDSVFLFPPKPKDVLMISRTPEVTCVVIDVSHEDPEVKFNWYVDGVEVHNAKTKPREEQYNSTYRVVSVLPVLHQDWLNGKEYKCKVSNKALPKPIEKTISKAKGQPREPQVYTLPPSREEMTKNQVSLTCLVKGFYPSDIAVEWESNGQPENNYKTTPPVLDSDGSFFLYSKLTVDKSRWQQGNVFSCSVMHEALHAHTTRKELSLSP

SEQ ID NO: 308 - protein, 328 aa, Homo sapiens
ASTKGPSVFPLAPSSKSTSGGTAALGCLVKDYFPEPVTVSWNSGALTSGVHTFPAVLQSSGLYSLSSVVTVPSSSLGTQTYICNVNHKPSNTKVDKKVEPKSCDKTHTCPPCPAPELLGGDSVFLFPPKPKDVLMISRTPEVTCVVVDVAHEDPEVKFNWYVDGVEVHNAKTKPREEQYNSTYRVVSVLPVLHQDWLNGKEYKCKVSNKALPKPIEKTISKAKGQPREPQVYTLPPSREEMTKNQVSLTCLVKGFYPSDIAVEWESNGQPENNYKTTPPVLDSDGSFFLYSKLTVDKSRWQQGNVFSCSVMHEALHAHTTRKELSLSP

SEQ ID NO: 309 - protein, 328 aa, Homo sapiens
ASTKGPSVFPLAPSSKSTSGGTAALGCLVKDYFPEPVTVSWNSGALTSGVHTFPAVLQSSGLYSLSSVVTVPSSSLGTQTYICNVNHKPSNTKVDKKVEPKSCDKTHTCPPCPAPEYLGGDSVFLFPPKPKDVLMISRTPEVTCVVVDVSHEDPEVKFNWYVDGVEVHNAKTKPREEQYNSTYRVVSVLPVLHQDWLNGKEYKCKVSNKALPKPIEKTISKAKGQPREPQVYTLPPSREEMTKNQVSLTCLVKGFYPSDIAVEWESNGQPENNYKTTPPVLDSDGSFFLYSKLTVDKSRWQQGNVFSCSVMHEALHAHTTRKELSLSP

SEQ ID NO: 310 - protein, 328 aa, Homo sapiens
ASTKGPSVFPLAPSSKSTSGGTAALGCLVKDYFPEPVTVSWNSGALTSGVHTFPAVLQSSGLYSLSSVVTVPSSSLGTQTYICNVNHKPSNTKVDKKVEPKSCDKTHTCPPCPAPEYLGGDSVFLFPPKPKDVLMISRTPEVTCVVVDVAHEDPEVKFNWYVDGVEVHNAKTKPREEQYNSTYRVVSVLPVLHQDWLNGKEYKCKVSNKALPKPIEKTISKAKGQPREPQVYTLPPSREEMTKNQVSLTCLVKGFYPSDIAVEWESNGQPENNYKTTPPVLDSDGSFFLYSKLTVDKSRWQQGNVFSCSVMHEALHAHTTRKELSLSP

SEQ ID NO: 311 - protein, 328 aa, Homo sapiens
ASTKGPSVFPLAPSSKSTSGGTAALGCLVKDYFPEPVTVSWNSGALTSGVHTFPAVLQSSGLYSLSSVVTVPSSSLGTQTYICNVNHKPSNTKVDKKVEPKSCDKTHTCPPCPAPELLGGDSVFLFPPKPKDVLMISRTPEVTCVVIDVAHEDPEVKFNWYVDGVEVHNAKTKPREEQYNSTYRVVSVLPVLHQDWLNGKEYKCKVSNKALPKPIEKTISKAKGQPREPQVYTLPPSREEMTKNQVSLTCLVKGFYPSDIAVEWESNGQPENNYKTTPPVLDSDGSFFLYSKLTVDKSRWQQGNVFSCSVMHEALHAHTTRKELSLSP

SEQ ID NO: 312 - protein, 328 aa, Homo sapiens
ASTKGPSVFPLAPSSKSTSGGTAALGCLVKDYFPEPVTVSWNSGALTSGVHTFPAVLQSSGLYSLSSVVTVPSSSLGTQTYICNVNHKPSNTKVDKKVEPKSCDKTHTCPPCPAPEYLGGDSVFLFPPKPKDVLMISRTPEVTCVVIDVSHEDPEVKFNWYVDGVEVHNAKTKPREEQYNSTYRVVSVLPVLHQDWLNGKEYKCKVSNKALPKPIEKTISKAKGQPREPQVYTLPPSREEMTKNQVSLTCLVKGFYPSDIAVEWESNGQPENNYKTTPPVLDSDGSFFLYSKLTVDKSRWQQGNVFSCSVMHEALHAHTTRKELSLSP

SEQ ID NO: 313 - protein, 328 aa, Homo sapiens
ASTKGPSVFPLAPSSKSTSGGTAALGCLVKDYFPEPVTVSWNSGALTSGVHTFPAVLQSSGLYSLSSVVTVPSSSLGTQTYICNVNHKPSNTKVDKKVEPKSCDKTHTCPPCPAPEYLGGDSVFLFPPKPKDVLMISRTPEVTCVVIDVAHEDPEVKFNWYVDGVEVHNAKTKPREEQYNSTYRVVSVLPVLHQDWLNGKEYKCKVSNKALPKPIEKTISKAKGQPREPQVYTLPPSREEMTKNQVSLTCLVKGFYPSDIAVEWESNGQPENNYKTTPPVLDSDGSFFLYSKLTVDKSRWQQGNVFSCSVMHEALHAHTTRKELSLSP

SEQ ID NO: 314 - protein, 328 aa, Homo sapiens
ASTKGPSVFPLAPSSKSTSGGTAALGCLVKDYFPEPVTVSWNSGALTSGVHTFPAVLQSSGLYSLSSVVTVPSSSLGTQTYICNVNHKPSNTKVDKKVEPKSCDKTHTCPPCPAPELLGGDSVFLFPPKPKDVLMISRTPEVTCVVVDVSHEDPEVKFNWYVDGVEVHNAKTKPREEQYNSTYRVVSVLPVLHRDWLNGKEYKCKVSNKALPKPIEKTISKAKGQRREPQVYTLPPSREEMTKNQVSLTCLVKGFYPSDIAVEWESNGQPENNYKTTPPVLDSDGSFFLYSKLTVDKSRWQQGNVFSCSVMHEALHAHTTRKELSLSP

SEQ ID NO: 315 - protein, 328 aa, Homo sapiens
ASTKGPSVFPLAPSSKSTSGGTAALGCLVKDYFPEPVTVSWNSGALTSGVHTFPAVLQSSGLYSLSSVVTVPSSSLGTQTYICNVNHKPSNTKVDKKVEPKSCDKTHTCPPCPAPELLGGDSVFLFPPKPKDVLMISRTPEVTCVVVDVSHEDPEVKFNWYVDGVEVHNAKTKPREEQYNSTYRVVSVLPVLHRDWLNGKEYKCKVSNKALPKPIEKTISKAKGQPREPQVYTLPPSREEMTKNQVSLTCLVKGFYPSDIAVEWESNGQPENNYKTTPPVLDSDGSFFLYSKLTVKKSRWQQGNVFSCSVMHEALHAHTTRKELSLSP

SEQ ID NO: 316 - protein, 328 aa, Homo sapiens
ASTKGPSVFPLAPSSKSTSGGTAALGCLVKDYFPEPVTVSWNSGALTSGVHTFPAVLQSSGLYSLSSVVTVPSSSLGTQTYICNVNHKPSNTKVDKKVEPKSCDKTHTCPPCPAPELLGGDSVFLFPPKPKDVLMISRTPEVTCVVIDVSHEDPEVKFNWYVDGVEVHNAKTKPREEQYNSTYRVVSVLPVLHRDWLNGKEYKCKVSNKALPKPIEKTISKAKGQRREPQVYTLPPSREEMTKNQVSLTCLVKGFYPSDIAVEWESNGQPENNYKTTPPVLDSDGSFFLYSKLTVDKSRWQQGNVFSCSVMHEALHAHTTRKELSLSP

SEQ ID NO: 317 - protein, 328 aa, Homo sapiens
ASTKGPSVFPLAPSSKSTSGGTAALGCLVKDYFPEPVTVSWNSGALTSGVHTFPAVLQSSGLYSLSSVVTVPSSSLGTQTYICNVNHKPSNTKVDKKVEPKSCDKTHTCPPCPAPELLGGDSVFLFPPKPKDVLMISRTPEVTCVVIDVSHEDPEVKFNWYVDGVEVHNAKTKPREEQYNSTYRVVSVLPVLHRDWLNGKEYKCKVSNKALPKPIEKTISKAKGQPREPQVYTLPPSREEMTKNQVSLTCLVKGFYPSDIAVEWESNGQPENNYKTTPPVLDSDGSFFLYSKLTVKKSRWQQGNVFSCSVMHEALHAHTTRKELSLSP

SEQ ID NO: 318 - protein, 328 aa, Homo sapiens
ASTKGPSVFPLAPSSKSTSGGTAALGCLVKDYFPEPVTVSWNSGALTSGVHTFPAVLQSSGLYSLSSVVTVPSSSLGTQTYICNVNHKPSNTKVDKKVEPKSCDKTHTCPPCPAPELLGGDSVFLFPPKPKDVLMISRTPEVTCVVVDVAHEDPEVKFNWYVDGVEVHNAKTKPREEQYNSTYRVVSVLPVLHRDWLNGKEYKCKVSNKALPKPIEKTISKAKGQRREPQVYTLPPSREEMTKNQVSLTCLVKGFYPSDIAVEWESNGQPENNYKTTPPVLDSDGSFFLYSKLTVDKSRWQQGNVFSCSVMHEALHAHTTRKELSLSP

SEQ ID NO: 319 - protein, 328 aa, Homo sapiens
ASTKGPSVFPLAPSSKSTSGGTAALGCLVKDYFPEPVTVSWNSGALTSGVHTFPAVLQSSGLYSLSSVVTVPSSSLGTQTYICNVNHKPSNTKVDKKVEPKSCDKTHTCPPCPAPELLGGDSVFLFPPKPKDVLMISRTPEVTCVVVDVAHEDPEVKFNWYVDGVEVHNAKTKPREEQYNSTYRVVSVLPVLHRDWLNGKEYKCKVSNKALPKPIEKTISKAKGQPREPQVYTLPPSREEMTKNQVSLTCLVKGFYPSDIAVEWESNGQPENNYKTTPPVLDSDGSFFLYSKLTVKKSRWQQGNVFSCSVMHEALHAHTTRKELSLSP

SEQ ID NO: 320 - protein, 328 aa, Homo sapiens
ASTKGPSVFPLAPSSKSTSGGTAALGCLVKDYFPEPVTVSWNSGALTSGVHTFPAVLQSSGLYSLSSVVTVPSSSLGTQTYICNVNHKPSNTKVDKKVEPKSCDKTHTCPPCPAPEYLGGDSVFLFPPKPKDVLMISRTPEVTCVVVDVSHEDPEVKFNWYVDGVEVHNAKTKPREEQYNSTYRVVSVLPVLHRDWLNGKEYKCKVSNKALPKPIEKTISKAKGQRREPQVYTLPPSREEMTKNQVSLTCLVKGFYPSDIAVEWESNGQPENNYKTTPPVLDSDGSFFLYSKLTVDKSRWQQGNVFSCSVMHEALHAHTTRKELSLSP

SEQ ID NO: 321 - protein, 328 aa, Homo sapiens
ASTKGPSVFPLAPSSKSTSGGTAALGCLVKDYFPEPVTVSWNSGALTSGVHTFPAVLQSSGLYSLSSVVTVPSSSLGTQTYICNVNHKPSNTKVDKKVEPKSCDKTHTCPPCPAPEYLGGDSVFLFPPKPKDVLMISRTPEVTCVVVDVSHEDPEVKFNWYVDGVEVHNAKTKPREEQYNSTYRVVSVLPVLHRDWLNGKEYKCKVSNKALPKPIEKTISKAKGQPREPQVYTLPPSREEMTKNQVSLTCLVKGFYPSDIAVEWESNGQPENNYKTTPPVLDSDGSFFLYSKLTVKKSRWQQGNVFSCSVMHEALHAHTTRKELSLSP

SEQ ID NO: 322 - protein, 328 aa, Homo sapiens
ASTKGPSVFPLAPSSKSTSGGTAALGCLVKDYFPEPVTVSWNSGALTSGVHTFPAVLQSSGLYSLSSVVTVPSSSLGTQTYICNVNHKPSNTKVDKKVEPKSCDKTHTCPPCPAPEYLGGDSVFLFPPKPKDVLMISRTPEVTCVVVDVAHEDPEVKFNWYVDGVEVHNAKTKPREEQYNSTYRVVSVLPVLHRDWLNGKEYKCKVSNKALPKPIEKTISKAKGQRREPQVYTLPPSREEMTKNQVSLTCLVKGFYPSDIAVEWESNGQPENNYKTTPPVLDSDGSFFLYSKLTVDKSRWQQGNVFSCSVMHEALHAHTTRKELSLSP

SEQ ID NO: 323 - protein, 328 aa, Homo sapiens
ASTKGPSVFPLAPSSKSTSGGTAALGCLVKDYFPEPVTVSWNSGALTSGVHTFPAVLQSSGLYSLSSVVTVPSSSLGTQTYICNVNHKPSNTKVDKKVEPKSCDKTHTCPPCPAPEYLGGDSVFLFPPKPKDVLMISRTPEVTCVVVDVAHEDPEVKFNWYVDGVEVHNAKTKPREEQYNSTYRVVSVLPVLHRDWLNGKEYKCKVSNKALPKPIEKTISKAKGQPREPQVYTLPPSREEMTKNQVSLTCLVKGFYPSDIAVEWESNGQPENNYKTTPPVLDSDGSFFLYSKLTVKKSRWQQGNVFSCSVMHEALHAHTTRKELSLSP

SEQ ID NO: 324 - protein, 328 aa, Homo sapiens
ASTKGPSVFPLAPSSKSTSGGTAALGCLVKDYFPEPVTVSWNSGALTSGVHTFPAVLQSSGLYSLSSVVTVPSSSLGTQTYICNVNHKPSNTKVDKKVEPKSCDKTHTCPPCPAPELLGGDSVFLFPPKPKDVLMISRTPEVTCVVIDVAHEDPEVKFNWYVDGVEVHNAKTKPREEQYNSTYRVVSVLPVLHRDWLNGKEYKCKVSNKALPKPIEKTISKAKGQRREPQVYTLPPSREEMTKNQVSLTCLVKGFYPSDIAVEWESNGQPENNYKTTPPVLDSDGSFFLYSKLTVDKSRWQQGNVFSCSVMHEALHAHTTRKELSLSP

SEQ ID NO: 325 - protein, 328 aa, Homo sapiens
ASTKGPSVFPLAPSSKSTSGGTAALGCLVKDYFPEPVTVSWNSGALTSGVHTFPAVLQSSGLYSLSSVVTVPSSSLGTQTYICNVNHKPSNTKVDKKVEPKSCDKTHTCPPCPAPELLGGDSVFLFPPKPKDVLMISRTPEVTCVVIDVAHEDPEVKFNWYVDGVEVHNAKTKPREEQYNSTYRVVSVLPVLHRDWLNGKEYKCKVSNKALPKPIEKTISKAKGQPREPQVYTLPPSREEMTKNQVSLTCLVKGFYPSDIAVEWESNGQPENNYKTTPPVLDSDGSFFLYSKLTVKKSRWQQGNVFSCSVMHEALHAHTTRKELSLSP

SEQ ID NO: 326 - protein, 328 aa, Homo sapiens
ASTKGPSVFPLAPSSKSTSGGTAALGCLVKDYFPEPVTVSWNSGALTSGVHTFPAVLQSSGLYSLSSVVTVPSSSLGTQTYICNVNHKPSNTKVDKKVEPKSCDKTHTCPPCPAPEYLGGDSVFLFPPKPKDVLMISRTPEVTCVVIDVSHEDPEVKFNWYVDGVEVHNAKTKPREEQYNSTYRVVSVLPVLHRDWLNGKEYKCKVSNKALPKPIEKTISKAKGQRREPQVYTLPPSREEMTKNQVSLTCLVKGFYPSDIAVEWESNGQPENNYKTTPPVLDSDGSFFLYSKLTVDKSRWQQGNVFSCSVMHEALHAHTTRKELSLSP

SEQ ID NO: 327 - protein, 328 aa, Homo sapiens
ASTKGPSVFPLAPSSKSTSGGTAALGCLVKDYFPEPVTVSWNSGALTSGVHTFPAVLQSSGLYSLSSVVTVPSSSLGTQTYICNVNHKPSNTKVDKKVEPKSCDKTHTCPPCPAPEYLGGDSVFLFPPKPKDVLMISRTPEVTCVVIDVSHEDPEVKFNWYVDGVEVHNAKTKPREEQYNSTYRVVSVLPVLHRDWLNGKEYKCKVSNKALPKPIEKTISKAKGQPREPQVYTLPPSREEMTKNQVSLTCLVKGFYPSDIAVEWESNGQPENNYKTTPPVLDSDGSFFLYSKLTVKKSRWQQGNVFSCSVMHEALHAHTTRKELSLSP

SEQ ID NO: 328 - protein, 328 aa, Homo sapiens
ASTKGPSVFPLAPSSKSTSGGTAALGCLVKDYFPEPVTVSWNSGALTSGVHTFPAVLQSSGLYSLSSVVTVPSSSLGTQTYICNVNHKPSNTKVDKKVEPKSCDKTHTCPPCPAPEYLGGDSVFLFPPKPKDVLMISRTPEVTCVVIDVAHEDPEVKFNWYVDGVEVHNAKTKPREEQYNSTYRVVSVLPVLHRDWLNGKEYKCKVSNKALPKPIEKTISKAKGQRREPQVYTLPPSREEMTKNQVSLTCLVKGFYPSDIAVEWESNGQPENNYKTTPPVLDSDGSFFLYSKLTVDKSRWQQGNVFSCSVMHEALHAHTTRKELSLSP

SEQ ID NO: 329 - protein, 328 aa, Homo sapiens
ASTKGPSVFPLAPSSKSTSGGTAALGCLVKDYFPEPVTVSWNSGALTSGVHTFPAVLQSSGLYSLSSVVTVPSSSLGTQTYICNVNHKPSNTKVDKKVEPKSCDKTHTCPPCPAPEYLGGDSVFLFPPKPKDVLMISRTPEVTCVVIDVAHEDPEVKFNWYVDGVEVHNAKTKPREEQYNSTYRVVSVLPVLHRDWLNGKEYKCKVSNKALPKPIEKTISKAKGQPREPQVYTLPPSREEMTKNQVSLTCLVKGFYPSDIAVEWESNGQPENNYKTTPPVLDSDGSFFLYSKLTVKKSRWQQGNVFSCSVMHEALHAHTTRKELSLSP

SEQ ID NO: 330 - protein, 328 aa, Homo sapiens
ASTKGPSVFPLAPSSKSTSGGTAALGCLVKDYFPEPVTVSWNSGALTSGVHTFPAVLQSSGLYSLSSVVTVPSSSLGTQTYICNVNHKPSNTKVDKKVEPKSCDKTHTCPPCPAPELLGGDSVFLFPPKPKDTLMISRTPEVTCVVVDVSHEDPEVKFNWYVDGVEVHNAKTKPREEQYNSTYRVVSVLTVLHQDWLNGKEYKCKVSNKALPAPIEKTISKAKGQPREPQVYTLPPSREEMTKNQVSLTCLVKGFYPSDIAVEWESNGQPENNYKTTPPVLDSDGSFFLYSKLTVDKSRWQQGNVFSCSVLHEALHAHTTRKELSLSP

SEQ ID NO: 331 - protein, 328 aa, Homo sapiens
ASTKGPSVFPLAPSSKSTSGGTAALGCLVKDYFPEPVTVSWNSGALTSGVHTFPAVLQSSGLYSLSSVVTVPSSSLGTQTYICNVNHKPSNTKVDKKVEPKSCDKTHTCPPCPAPELLGGDSVFLFPPKPKDVLMISRTPEVTCVVVDVSHEDPEVKFNWYVDGVEVHNAKTKPREEQYNSTYRVVSVLPVLHQDWLNGKEYKCKVSNKALPAPIEKTISKAKGQPREPQVYTLPPSREEMTKNQVSLTCLVKGFYPSDIAVEWESNGQPENNYKTTPPVLDSDGSFFLYSKLTVDKSRWQQGNVFSCSVLHEALHAHTTRKELSLSP

SEQ ID NO: 332 - protein, 328 aa, Homo sapiens
ASTKGPSVFPLAPSSKSTSGGTAALGCLVKDYFPEPVTVSWNSGALTSGVHTFPAVLQSSGLYSLSSVVTVPSSSLGTQTYICNVNHKPSNTKVDKKVEPKSCDKTHTCPPCPAPELLGGDSVFLFPPKPKDVLMISRTPEVTCVVVDVSHEDPEVKFNWYVDGVEVHNAKTKPREEQYNSTYRVVSVLPVLHQDWLNGKEYKCKVSNKALPKPIEKTISKAKGQPREPQVYTLPPSREEMTKNQVSLTCLVKGFYPSDIAVEWESNGQPENNYKTTPPVLDSDGSFFLYSKLTVDKSRWQQGNVFSCSVLHEALHAHTTRKELSLSP

SEQ ID NO: 333 - protein, 328 aa, Homo sapiens
ASTKGPSVFPLAPSSKSTSGGTAALGCLVKDYFPEPVTVSWNSGALTSGVHTFPAVLQSSGLYSLSSVVTVPSSSLGTQTYICNVNHKPSNTKVDKKVEPKSCDKTHTCPPCPAPELLGGDSVFLFPPKPKDVLMISRTPEVTCVVIDVSHEDPEVKFNWYVDGVEVHNAKTKPREEQYNSTYRVVSVLPVLHQDWLNGKEYKCKVSNKALPKPIEKTISKAKGQPREPQVYTLPPSREEMTKNQVSLTCLVKGFYPSDIAVEWESNGQPENNYKTTPPVLDSDGSFFLYSKLTVDKSRWQQGNVFSCSVLHEALHAHTTRKELSLSP

SEQ ID NO: 334 - protein, 328 aa, Homo sapiens
ASTKGPSVFPLAPSSKSTSGGTAALGCLVKDYFPEPVTVSWNSGALTSGVHTFPAVLQSSGLYSLSSVVTVPSSSLGTQTYICNVNHKPSNTKVDKKVEPKSCDKTHTCPPCPAPELLGGDSVFLFPPKPKDVLMISRTPEVTCVVVDVAHEDPEVKFNWYVDGVEVHNAKTKPREEQYNSTYRVVSVLPVLHQDWLNGKEYKCKVSNKALPKPIEKTISKAKGQPREPQVYTLPPSREEMTKNQVSLTCLVKGFYPSDIAVEWESNGQPENNYKTTPPVLDSDGSFFLYSKLTVDKSRWQQGNVFSCSVLHEALHAHTTRKELSLSP

SEQ ID NO: 335 - protein, 328 aa, Homo sapiens
ASTKGPSVFPLAPSSKSTSGGTAALGCLVKDYFPEPVTVSWNSGALTSGVHTFPAVLQSSGLYSLSSVVTVPSSSLGTQTYICNVNHKPSNTKVDKKVEPKSCDKTHTCPPCPAPEYLGGDSVFLFPPKPKDVLMISRTPEVTCVVVDVSHEDPEVKFNWYVDGVEVHNAKTKPREEQYNSTYRVVSVLPVLHQDWLNGKEYKCKVSNKALPKPIEKTISKAKGQPREPQVYTLPPSREEMTKNQVSLTCLVKGFYPSDIAVEWESNGQPENNYKTTPPVLDSDGSFFLYSKLTVDKSRWQQGNVFSCSVLHEALHAHTTRKELSLSP

SEQ ID NO: 336 - protein, 328 aa, Homo sapiens
ASTKGPSVFPLAPSSKSTSGGTAALGCLVKDYFPEPVTVSWNSGALTSGVHTFPAVLQSSGLYSLSSVVTVPSSSLGTQTYICNVNHKPSNTKVDKKVEPKSCDKTHTCPPCPAPEYLGGDSVFLFPPKPKDVLMISRTPEVTCVVVDVAHEDPEVKFNWYVDGVEVHNAKTKPREEQYNSTYRVVSVLPVLHQDWLNGKEYKCKVSNKALPKPIEKTISKAKGQPREPQVYTLPPSREEMTKNQVSLTCLVKGFYPSDIAVEWESNGQPENNYKTTPPVLDSDGSFFLYSKLTVDKSRWQQGNVFSCSVLHEALHAHTTRKELSLSP

SEQ ID NO: 337 - protein, 328 aa, Homo sapiens
ASTKGPSVFPLAPSSKSTSGGTAALGCLVKDYFPEPVTVSWNSGALTSGVHTFPAVLQSSGLYSLSSVVTVPSSSLGTQTYICNVNHKPSNTKVDKKVEPKSCDKTHTCPPCPAPELLGGDSVFLFPPKPKDVLMISRTPEVTCVVIDVAHEDPEVKFNWYVDGVEVHNAKTKPREEQYNSTYRVVSVLPVLHQDWLNGKEYKCKVSNKALPKPIEKTISKAKGQPREPQVYTLPPSREEMTKNQVSLTCLVKGFYPSDIAVEWESNGQPENNYKTTPPVLDSDGSFFLYSKLTVDKSRWQQGNVFSCSVLHEALHAHTTRKELSLSP

SEQ ID NO: 338 - protein, 328 aa, Homo sapiens
ASTKGPSVFPLAPSSKSTSGGTAALGCLVKDYFPEPVTVSWNSGALTSGVHTFPAVLQSSGLYSLSSVVTVPSSSLGTQTYICNVNHKPSNTKVDKKVEPKSCDKTHTCPPCPAPEYLGGDSVFLFPPKPKDVLMISRTPEVTCVVIDVSHEDPEVKFNWYVDGVEVHNAKTKPREEQYNSTYRVVSVLPVLHQDWLNGKEYKCKVSNKALPKPIEKTISKAKGQPREPQVYTLPPSREEMTKNQVSLTCLVKGFYPSDIAVEWESNGQPENNYKTTPPVLDSDGSFFLYSKLTVDKSRWQQGNVFSCSVLHEALHAHTTRKELSLSP

SEQ ID NO: 339 - protein, 328 aa, Homo sapiens
ASTKGPSVFPLAPSSKSTSGGTAALGCLVKDYFPEPVTVSWNSGALTSGVHTFPAVLQSSGLYSLSSVVTVPSSSLGTQTYICNVNHKPSNTKVDKKVEPKSCDKTHTCPPCPAPEYLGGDSVFLFPPKPKDVLMISRTPEVTCVVIDVAHEDPEVKFNWYVDGVEVHNAKTKPREEQYNSTYRVVSVLPVLHQDWLNGKEYKCKVSNKALPKPIEKTISKAKGQPREPQVYTLPPSREEMTKNQVSLTCLVKGFYPSDIAVEWESNGQPENNYKTTPPVLDSDGSFFLYSKLTVDKSRWQQGNVFSCSVLHEALHAHTTRKELSLSP

SEQ ID NO: 340 - protein, 328 aa, Homo sapiens
ASTKGPSVFPLAPSSKSTSGGTAALGCLVKDYFPEPVTVSWNSGALTSGVHTFPAVLQSSGLYSLSSVVTVPSSSLGTQTYICNVNHKPSNTKVDKKVEPKSCDKTHTCPPCPAPELLGGDSVFLFPPKPKDVLMISRTPEVTCVVVDVSHEDPEVKFNWYVDGVEVHNAKTKPREEQYNSTYRVVSVLPVLHRDWLNGKEYKCKVSNKALPKPIEKTISKAKGQRREPQVYTLPPSREEMTKNQVSLTCLVKGFYPSDIAVEWESNGQPENNYKTTPPVLDSDGSFFLYSKLTVDKSRWQQGNVFSCSVLHEALHAHTTRKELSLSP

SEQ ID NO: 341 - protein, 328 aa, Homo sapiens
ASTKGPSVFPLAPSSKSTSGGTAALGCLVKDYFPEPVTVSWNSGALTSGVHTFPAVLQSSGLYSLSSVVTVPSSSLGTQTYICNVNHKPSNTKVDKKVEPKSCDKTHTCPPCPAPELLGGDSVFLFPPKPKDVLMISRTPEVTCVVVDVSHEDPEVKFNWYVDGVEVHNAKTKPREEQYNSTYRVVSVLPVLHRDWLNGKEYKCKVSNKALPKPIEKTISKAKGQPREPQVYTLPPSREEMTKNQVSLTCLVKGFYPSDIAVEWESNGQPENNYKTTPPVLDSDGSFFLYSKLTVKKSRWQQGNVFSCSVLHEALHAHTTRKELSLSP

SEQ ID NO: 342 - protein, 328 aa, Homo sapiens
ASTKGPSVFPLAPSSKSTSGGTAALGCLVKDYFPEPVTVSWNSGALTSGVHTFPAVLQSSGLYSLSSVVTVPSSSLGTQTYICNVNHKPSNTKVDKKVEPKSCDKTHTCPPCPAPELLGGDSVFLFPPKPKDVLMISRTPEVTCVVIDVSHEDPEVKFNWYVDGVEVHNAKTKPREEQYNSTYRVVSVLPVLHRDWLNGKEYKCKVSNKALPKPIEKTISKAKGQRREPQVYTLPPSREEMTKNQVSLTCLVKGFYPSDIAVEWESNGQPENNYKTTPPVLDSDGSFFLYSKLTVDKSRWQQGNVFSCSVLHEALHAHTTRKELSLSP

SEQ ID NO: 343 - protein, 328 aa, Homo sapiens
ASTKGPSVFPLAPSSKSTSGGTAALGCLVKDYFPEPVTVSWNSGALTSGVHTFPAVLQSSGLYSLSSVVTVPSSSLGTQTYICNVNHKPSNTKVDKKVEPKSCDKTHTCPPCPAPELLGGDSVFLFPPKPKDVLMISRTPEVTCVVIDVSHEDPEVKFNWYVDGVEVHNAKTKPREEQYNSTYRVVSVLPVLHRDWLNGKEYKCKVSNKALPKPIEKTISKAKGQPREPQVYTLPPSREEMTKNQVSLTCLVKGFYPSDIAVEWESNGQPENNYKTTPPVLDSDGSFFLYSKLTVKKSRWQQGNVFSCSVLHEALHAHTTRKELSLSP

SEQ ID NO: 344 - protein, 328 aa, Homo sapiens
ASTKGPSVFPLAPSSKSTSGGTAALGCLVKDYFPEPVTVSWNSGALTSGVHTFPAVLQSSGLYSLSSVVTVPSSSLGTQTYICNVNHKPSNTKVDKKVEPKSCDKTHTCPPCPAPELLGGDSVFLFPPKPKDVLMISRTPEVTCVVVDVAHEDPEVKFNWYVDGVEVHNAKTKPREEQYNSTYRVVSVLPVLHRDWLNGKEYKCKVSNKALPKPIEKTISKAKGQRREPQVYTLPPSREEMTKNQVSLTCLVKGFYPSDIAVEWESNGQPENNYKTTPPVLDSDGSFFLYSKLTVDKSRWQQGNVFSCSVLHEALHAHTTRKELSLSP

SEQ ID NO: 345 - protein, 328 aa, Homo sapiens
ASTKGPSVFPLAPSSKSTSGGTAALGCLVKDYFPEPVTVSWNSGALTSGVHTFPAVLQSSGLYSLSSVVTVPSSSLGTQTYICNVNHKPSNTKVDKKVEPKSCDKTHTCPPCPAPELLGGDSVFLFPPKPKDVLMISRTPEVTCVVVDVAHEDPEVKFNWYVDGVEVHNAKTKPREEQYNSTYRVVSVLPVLHRDWLNGKEYKCKVSNKALPKPIEKTISKAKGQPREPQVYTLPPSREEMTKNQVSLTCLVKGFYPSDIAVEWESNGQPENNYKTTPPVLDSDGSFFLYSKLTVKKSRWQQGNVFSCSVLHEALHAHTTRKELSLSP

SEQ ID NO: 346 - protein, 328 aa, Homo sapiens
ASTKGPSVFPLAPSSKSTSGGTAALGCLVKDYFPEPVTVSWNSGALTSGVHTFPAVLQSSGLYSLSSVVTVPSSSLGTQTYICNVNHKPSNTKVDKKVEPKSCDKTHTCPPCPAPEYLGGDSVFLFPPKPKDVLMISRTPEVTCVVVDVSHEDPEVKFNWYVDGVEVHNAKTKPREEQYNSTYRVVSVLPVLHRDWLNGKEYKCKVSNKALPKPIEKTISKAKGQRREPQVYTLPPSREEMTKNQVSLTCLVKGFYPSDIAVEWESNGQPENNYKTTPPVLDSDGSFFLYSKLTVDKSRWQQGNVFSCSVLHEALHAHTTRKELSLSP

SEQ ID NO: 347 - protein, 328 aa, Homo sapiens
ASTKGPSVFPLAPSSKSTSGGTAALGCLVKDYFPEPVTVSWNSGALTSGVHTFPAVLQSSGLYSLSSVVTVPSSSLGTQTYICNVNHKPSNTKVDKKVEPKSCDKTHTCPPCPAPEYLGGDSVFLFPPKPKDVLMISRTPEVTCVVVDVSHEDPEVKFNWYVDGVEVHNAKTKPREEQYNSTYRVVSVLPVLHRDWLNGKEYKCKVSNKALPKPIEKTISKAKGQPREPQVYTLPPSREEMTKNQVSLTCLVKGFYPSDIAVEWESNGQPENNYKTTPPVLDSDGSFFLYSKLTVKKSRWQQGNVFSCSVLHEALHAHTTRKELSLSP

SEQ ID NO: 348 - protein, 328 aa, Homo sapiens
ASTKGPSVFPLAPSSKSTSGGTAALGCLVKDYFPEPVTVSWNSGALTSGVHTFPAVLQSSGLYSLSSVVTVPSSSLGTQTYICNVNHKPSNTKVDKKVEPKSCDKTHTCPPCPAPEYLGGDSVFLFPPKPKDVLMISRTPEVTCVVVDVAHEDPEVKFNWYVDGVEVHNAKTKPREEQYNSTYRVVSVLPVLHRDWLNGKEYKCKVSNKALPKPIEKTISKAKGQRREPQVYTLPPSREEMTKNQVSLTCLVKGFYPSDIAVEWESNGQPENNYKTTPPVLDSDGSFFLYSKLTVDKSRWQQGNVFSCSVLHEALHAHTTRKELSLSP

SEQ ID NO: 349 - protein, 328 aa, Homo sapiens
ASTKGPSVFPLAPSSKSTSGGTAALGCLVKDYFPEPVTVSWNSGALTSGVHTFPAVLQSSGLYSLSSVVTVPSSSLGTQTYICNVNHKPSNTKVDKKVEPKSCDKTHTCPPCPAPEYLGGDSVFLFPPKPKDVLMISRTPEVTCVVVDVAHEDPEVKFNWYVDGVEVHNAKTKPREEQYNSTYRVVSVLPVLHRDWLNGKEYKCKVSNKALPKPIEKTISKAKGQPREPQVYTLPPSREEMTKNQVSLTCLVKGFYPSDIAVEWESNGQPENNYKTTPPVLDSDGSFFLYSKLTVKKSRWQQGNVFSCSVLHEALHAHTTRKELSLSP

SEQ ID NO: 350 - protein, 328 aa, Homo sapiens
ASTKGPSVFPLAPSSKSTSGGTAALGCLVKDYFPEPVTVSWNSGALTSGVHTFPAVLQSSGLYSLSSVVTVPSSSLGTQTYICNVNHKPSNTKVDKKVEPKSCDKTHTCPPCPAPELLGGDSVFLFPPKPKDVLMISRTPEVTCVVIDVAHEDPEVKFNWYVDGVEVHNAKTKPREEQYNSTYRVVSVLPVLHRDWLNGKEYKCKVSNKALPKPIEKTISKAKGQRREPQVYTLPPSREEMTKNQVSLTCLVKGFYPSDIAVEWESNGQPENNYKTTPPVLDSDGSFFLYSKLTVDKSRWQQGNVFSCSVLHEALHAHTTRKELSLSP

SEQ ID NO: 351 - protein, 328 aa, Homo sapiens
ASTKGPSVFPLAPSSKSTSGGTAALGCLVKDYFPEPVTVSWNSGALTSGVHTFPAVLQSSGLYSLSSVVTVPSSSLGTQTYICNVNHKPSNTKVDKKVEPKSCDKTHTCPPCPAPELLGGDSVFLFPPKPKDVLMISRTPEVTCVVIDVAHEDPEVKFNWYVDGVEVHNAKTKPREEQYNSTYRVVSVLPVLHRDWLNGKEYKCKVSNKALPKPIEKTISKAKGQPREPQVYTLPPSREEMTKNQVSLTCLVKGFYPSDIAVEWESNGQPENNYKTTPPVLDSDGSFFLYSKLTVKKSRWQQGNVFSCSVLHEALHAHTTRKELSLSP

SEQ ID NO: 352 - protein, 328 aa, Homo sapiens
ASTKGPSVFPLAPSSKSTSGGTAALGCLVKDYFPEPVTVSWNSGALTSGVHTFPAVLQSSGLYSLSSVVTVPSSSLGTQTYICNVNHKPSNTKVDKKVEPKSCDKTHTCPPCPAPEYLGGDSVFLFPPKPKDVLMISRTPEVTCVVIDVSHEDPEVKFNWYVDGVEVHNAKTKPREEQYNSTYRVVSVLPVLHRDWLNGKEYKCKVSNKALPKPIEKTISKAKGQRREPQVYTLPPSREEMTKNQVSLTCLVKGFYPSDIAVEWESNGQPENNYKTTPPVLDSDGSFFLYSKLTVDKSRWQQGNVFSCSVLHEALHAHTTRKELSLSP

SEQ ID NO: 353 - protein, 328 aa, Homo sapiens
ASTKGPSVFPLAPSSKSTSGGTAALGCLVKDYFPEPVTVSWNSGALTSGVHTFPAVLQSSGLYSLSSVVTVPSSSLGTQTYICNVNHKPSNTKVDKKVEPKSCDKTHTCPPCPAPEYLGGDSVFLFPPKPKDVLMISRTPEVTCVVIDVSHEDPEVKFNWYVDGVEVHNAKTKPREEQYNSTYRVVSVLPVLHRDWLNGKEYKCKVSNKALPKPIEKTISKAKGQPREPQVYTLPPSREEMTKNQVSLTCLVKGFYPSDIAVEWESNGQPENNYKTTPPVLDSDGSFFLYSKLTVKKSRWQQGNVFSCSVLHEALHAHTTRKELSLSP

SEQ ID NO: 354 - protein, 328 aa, Homo sapiens
ASTKGPSVFPLAPSSKSTSGGTAALGCLVKDYFPEPVTVSWNSGALTSGVHTFPAVLQSSGLYSLSSVVTVPSSSLGTQTYICNVNHKPSNTKVDKKVEPKSCDKTHTCPPCPAPEYLGGDSVFLFPPKPKDVLMISRTPEVTCVVIDVAHEDPEVKFNWYVDGVEVHNAKTKPREEQYNSTYRVVSVLPVLHRDWLNGKEYKCKVSNKALPKPIEKTISKAKGQRREPQVYTLPPSREEMTKNQVSLTCLVKGFYPSDIAVEWESNGQPENNYKTTPPVLDSDGSFFLYSKLTVDKSRWQQGNVFSCSVLHEALHAHTTRKELSLSP

SEQ ID NO: 355 - protein, 328 aa, Homo sapiens
ASTKGPSVFPLAPSSKSTSGGTAALGCLVKDYFPEPVTVSWNSGALTSGVHTFPAVLQSSGLYSLSSVVTVPSSSLGTQTYICNVNHKPSNTKVDKKVEPKSCDKTHTCPPCPAPEYLGGDSVFLFPPKPKDVLMISRTPEVTCVVIDVAHEDPEVKFNWYVDGVEVHNAKTKPREEQYNSTYRVVSVLPVLHRDWLNGKEYKCKVSNKALPKPIEKTISKAKGQPREPQVYTLPPSREEMTKNQVSLTCLVKGFYPSDIAVEWESNGQPENNYKTTPPVLDSDGSFFLYSKLTVKKSRWQQGNVFSCSVLHEALHAHTTRKELSLSP

SEQ ID NO: 356 - protein, 328 aa, Homo sapiens
ASTKGPSVFPLAPSSKSTSGGTAALGCLVKDYFPEPVTVSWNSGALTSGVHTFPAVLQSSGLYSLSSVVTVPSSSLGTQTYICNVNHKPSNTKVDKKVEPKSCDKTHTCPPCPAPELLGGDSVFLFPPKPKDTLMISRTPEVTCVVVDVSHEDPEVKFNWYVDGVEVHNAKTKPREEQYNSTYRVVSVLTVLHQDWLNGKEYKCKVSNKALPAPIEKTISKAKGQPREPQVYTLPPSREEMTKNQVSLTCLVKGFYPSDIAVEWESNGQPENNYKTTPPVLDSDGSFFLYSKLTVDKSRWQQGNVFSCSVLHEALHAHYTRKELSLSP

SEQ ID NO: 357 - protein, 328 aa, Homo sapiens
ASTKGPSVFPLAPSSKSTSGGTAALGCLVKDYFPEPVTVSWNSGALTSGVHTFPAVLQSSGLYSLSSVVTVPSSSLGTQTYICNVNHKPSNTKVDKKVEPKSCDKTHTCPPCPAPELLGGDSVFLFPPKPKDVLMISRTPEVTCVVVDVSHEDPEVKFNWYVDGVEVHNAKTKPREEQYNSTYRVVSVLPVLHQDWLNGKEYKCKVSNKALPAPIEKTISKAKGQPREPQVYTLPPSREEMTKNQVSLTCLVKGFYPSDIAVEWESNGQPENNYKTTPPVLDSDGSFFLYSKLTVDKSRWQQGNVFSCSVLHEALHAHYTRKELSLSP

SEQ ID NO: 358 - protein, 328 aa, Homo sapiens
ASTKGPSVFPLAPSSKSTSGGTAALGCLVKDYFPEPVTVSWNSGALTSGVHTFPAVLQSSGLYSLSSVVTVPSSSLGTQTYICNVNHKPSNTKVDKKVEPKSCDKTHTCPPCPAPELLGGDSVFLFPPKPKDVLMISRTPEVTCVVVDVSHEDPEVKFNWYVDGVEVHNAKTKPREEQYNSTYRVVSVLPVLHQDWLNGKEYKCKVSNKALPKPIEKTISKAKGQPREPQVYTLPPSREEMTKNQVSLTCLVKGFYPSDIAVEWESNGQPENNYKTTPPVLDSDGSFFLYSKLTVDKSRWQQGNVFSCSVLHEALHAHYTRKELSLSP

SEQ ID NO: 359 - protein, 328 aa, Homo sapiens
ASTKGPSVFPLAPSSKSTSGGTAALGCLVKDYFPEPVTVSWNSGALTSGVHTFPAVLQSSGLYSLSSVVTVPSSSLGTQTYICNVNHKPSNTKVDKKVEPKSCDKTHTCPPCPAPELLGGDSVFLFPPKPKDVLMISRTPEVTCVVIDVSHEDPEVKFNWYVDGVEVHNAKTKPREEQYNSTYRVVSVLPVLHQDWLNGKEYKCKVSNKALPKPIEKTISKAKGQPREPQVYTLPPSREEMTKNQVSLTCLVKGFYPSDIAVEWESNGQPENNYKTTPPVLDSDGSFFLYSKLTVDKSRWQQGNVFSCSVLHEALHAHYTRKELSLSP

SEQ ID NO: 360 - protein, 328 aa, Homo sapiens
ASTKGPSVFPLAPSSKSTSGGTAALGCLVKDYFPEPVTVSWNSGALTSGVHTFPAVLQSSGLYSLSSVVTVPSSSLGTQTYICNVNHKPSNTKVDKKVEPKSCDKTHTCPPCPAPELLGGDSVFLFPPKPKDVLMISRTPEVTCVVVDVAHEDPEVKFNWYVDGVEVHNAKTKPREEQYNSTYRVVSVLPVLHQDWLNGKEYKCKVSNKALPKPIEKTISKAKGQPREPQVYTLPPSREEMTKNQVSLTCLVKGFYPSDIAVEWESNGQPENNYKTTPPVLDSDGSFFLYSKLTVDKSRWQQGNVFSCSVLHEALHAHYTRKELSLSP

SEQ ID NO: 361 - protein, 328 aa, Homo sapiens
ASTKGPSVFPLAPSSKSTSGGTAALGCLVKDYFPEPVTVSWNSGALTSGVHTFPAVLQSSGLYSLSSVVTVPSSSLGTQTYICNVNHKPSNTKVDKKVEPKSCDKTHTCPPCPAPEYLGGDSVFLFPPKPKDVLMISRTPEVTCVVVDVSHEDPEVKFNWYVDGVEVHNAKTKPREEQYNSTYRVVSVLPVLHQDWLNGKEYKCKVSNKALPKPIEKTISKAKGQPREPQVYTLPPSREEMTKNQVSLTCLVKGFYPSDIAVEWESNGQPENNYKTTPPVLDSDGSFFLYSKLTVDKSRWQQGNVFSCSVLHEALHAHYTRKELSLSP

SEQ ID NO: 362 - protein, 328 aa, Homo sapiens
ASTKGPSVFPLAPSSKSTSGGTAALGCLVKDYFPEPVTVSWNSGALTSGVHTFPAVLQSSGLYSLSSVVTVPSSSLGTQTYICNVNHKPSNTKVDKKVEPKSCDKTHTCPPCPAPEYLGGDSVFLFPPKPKDVLMISRTPEVTCVVVDVAHEDPEVKFNWYVDGVEVHNAKTKPREEQYNSTYRVVSVLPVLHQDWLNGKEYKCKVSNKALPKPIEKTISKAKGQPREPQVYTLPPSREEMTKNQVSLTCLVKGFYPSDIAVEWESNGQPENNYKTTPPVLDSDGSFFLYSKLTVDKSRWQQGNVFSCSVLHEALHAHYTRKELSLSP

SEQ ID NO: 363 - protein, 328 aa, Homo sapiens
ASTKGPSVFPLAPSSKSTSGGTAALGCLVKDYFPEPVTVSWNSGALTSGVHTFPAVLQSSGLYSLSSVVTVPSSSLGTQTYICNVNHKPSNTKVDKKVEPKSCDKTHTCPPCPAPELLGGDSVFLFPPKPKDVLMISRTPEVTCVVIDVAHEDPEVKFNWYVDGVEVHNAKTKPREEQYNSTYRVVSVLPVLHQDWLNGKEYKCKVSNKALPKPIEKTISKAKGQPREPQVYTLPPSREEMTKNQVSLTCLVKGFYPSDIAVEWESNGQPENNYKTTPPVLDSDGSFFLYSKLTVDKSRWQQGNVFSCSVLHEALHAHYTRKELSLSP

SEQ ID NO: 364 - protein, 328 aa, Homo sapiens
ASTKGPSVFPLAPSSKSTSGGTAALGCLVKDYFPEPVTVSWNSGALTSGVHTFPAVLQSSGLYSLSSVVTVPSSSLGTQTYICNVNHKPSNTKVDKKVEPKSCDKTHTCPPCPAPEYLGGDSVFLFPPKPKDVLMISRTPEVTCVVIDVSHEDPEVKFNWYVDGVEVHNAKTKPREEQYNSTYRVVSVLPVLHQDWLNGKEYKCKVSNKALPKPIEKTISKAKGQPREPQVYTLPPSREEMTKNQVSLTCLVKGFYPSDIAVEWESNGQPENNYKTTPPVLDSDGSFFLYSKLTVDKSRWQQGNVFSCSVLHEALHAHYTRKELSLSP

SEQ ID NO: 365 - protein, 328 aa, Homo sapiens
ASTKGPSVFPLAPSSKSTSGGTAALGCLVKDYFPEPVTVSWNSGALTSGVHTFPAVLQSSGLYSLSSVVTVPSSSLGTQTYICNVNHKPSNTKVDKKVEPKSCDKTHTCPPCPAPEYLGGDSVFLFPPKPKDVLMISRTPEVTCVVIDVAHEDPEVKFNWYVDGVEVHNAKTKPREEQYNSTYRVVSVLPVLHQDWLNGKEYKCKVSNKALPKPIEKTISKAKGQPREPQVYTLPPSREEMTKNQVSLTCLVKGFYPSDIAVEWESNGQPENNYKTTPPVLDSDGSFFLYSKLTVDKSRWQQGNVFSCSVLHEALHAHYTRKELSLSP

SEQ ID NO: 366 - protein, 328 aa, Homo sapiens
ASTKGPSVFPLAPSSKSTSGGTAALGCLVKDYFPEPVTVSWNSGALTSGVHTFPAVLQSSGLYSLSSVVTVPSSSLGTQTYICNVNHKPSNTKVDKKVEPKSCDKTHTCPPCPAPELLGGDSVFLFPPKPKDVLMISRTPEVTCVVVDVSHEDPEVKFNWYVDGVEVHNAKTKPREEQYNSTYRVVSVLPVLHRDWLNGKEYKCKVSNKALPKPIEKTISKAKGQRREPQVYTLPPSREEMTKNQVSLTCLVKGFYPSDIAVEWESNGQPENNYKTTPPVLDSDGSFFLYSKLTVDKSRWQQGNVFSCSVLHEALHAHYTRKELSLSP

SEQ ID NO: 367 - protein, 328 aa, Homo sapiens
ASTKGPSVFPLAPSSKSTSGGTAALGCLVKDYFPEPVTVSWNSGALTSGVHTFPAVLQSSGLYSLSSVVTVPSSSLGTQTYICNVNHKPSNTKVDKKVEPKSCDKTHTCPPCPAPELLGGDSVFLFPPKPKDVLMISRTPEVTCVVVDVSHEDPEVKFNWYVDGVEVHNAKTKPREEQYNSTYRVVSVLPVLHRDWLNGKEYKCKVSNKALPKPIEKTISKAKGQPREPQVYTLPPSREEMTKNQVSLTCLVKGFYPSDIAVEWESNGQPENNYKTTPPVLDSDGSFFLYSKLTVKKSRWQQGNVFSCSVLHEALHAHYTRKELSLSP

SEQ ID NO: 368 - protein, 328 aa, Homo sapiens
ASTKGPSVFPLAPSSKSTSGGTAALGCLVKDYFPEPVTVSWNSGALTSGVHTFPAVLQSSGLYSLSSVVTVPSSSLGTQTYICNVNHKPSNTKVDKKVEPKSCDKTHTCPPCPAPELLGGDSVFLFPPKPKDVLMISRTPEVTCVVIDVSHEDPEVKFNWYVDGVEVHNAKTKPREEQYNSTYRVVSVLPVLHRDWLNGKEYKCKVSNKALPKPIEKTISKAKGQRREPQVYTLPPSREEMTKNQVSLTCLVKGFYPSDIAVEWESNGQPENNYKTTPPVLDSDGSFFLYSKLTVDKSRWQQGNVFSCSVLHEALHAHYTRKELSLSP

SEQ ID NO: 369 - protein, 328 aa, Homo sapiens
ASTKGPSVFPLAPSSKSTSGGTAALGCLVKDYFPEPVTVSWNSGALTSGVHTFPAVLQSSGLYSLSSVVTVPSSSLGTQTYICNVNHKPSNTKVDKKVEPKSCDKTHTCPPCPAPELLGGDSVFLFPPKPKDVLMISRTPEVTCVVIDVSHEDPEVKFNWYVDGVEVHNAKTKPREEQYNSTYRVVSVLPVLHRDWLNGKEYKCKVSNKALPKPIEKTISKAKGQPREPQVYTLPPSREEMTKNQVSLTCLVKGFYPSDIAVEWESNGQPENNYKTTPPVLDSDGSFFLYSKLTVKKSRWQQGNVFSCSVLHEALHAHYTRKELSLSP

SEQ ID NO: 370 - protein, 328 aa, Homo sapiens
ASTKGPSVFPLAPSSKSTSGGTAALGCLVKDYFPEPVTVSWNSGALTSGVHTFPAVLQSSGLYSLSSVVTVPSSSLGTQTYICNVNHKPSNTKVDKKVEPKSCDKTHTCPPCPAPELLGGDSVFLFPPKPKDVLMISRTPEVTCVVVDVAHEDPEVKFNWYVDGVEVHNAKTKPREEQYNSTYRVVSVLPVLHRDWLNGKEYKCKVSNKALPKPIEKTISKAKGQRREPQVYTLPPSREEMTKNQVSLTCLVKGFYPSDIAVEWESNGQPENNYKTTPPVLDSDGSFFLYSKLTVDKSRWQQGNVFSCSVLHEALHAHYTRKELSLSP

SEQ ID NO: 371 - protein, 328 aa, Homo sapiens
ASTKGPSVFPLAPSSKSTSGGTAALGCLVKDYFPEPVTVSWNSGALTSGVHTFPAVLQSSGLYSLSSVVTVPSSSLGTQTYICNVNHKPSNTKVDKKVEPKSCDKTHTCPPCPAPELLGGDSVFLFPPKPKDVLMISRTPEVTCVVVDVAHEDPEVKFNWYVDGVEVHNAKTKPREEQYNSTYRVVSVLPVLHRDWLNGKEYKCKVSNKALPKPIEKTISKAKGQPREPQVYTLPPSREEMTKNQVSLTCLVKGFYPSDIAVEWESNGQPENNYKTTPPVLDSDGSFFLYSKLTVKKSRWQQGNVFSCSVLHEALHAHYTRKELSLSP

SEQ ID NO: 372 - protein, 328 aa, Homo sapiens
ASTKGPSVFPLAPSSKSTSGGTAALGCLVKDYFPEPVTVSWNSGALTSGVHTFPAVLQSSGLYSLSSVVTVPSSSLGTQTYICNVNHKPSNTKVDKKVEPKSCDKTHTCPPCPAPEYLGGDSVFLFPPKPKDVLMISRTPEVTCVVVDVSHEDPEVKFNWYVDGVEVHNAKTKPREEQYNSTYRVVSVLPVLHRDWLNGKEYKCKVSNKALPKPIEKTISKAKGQRREPQVYTLPPSREEMTKNQVSLTCLVKGFYPSDIAVEWESNGQPENNYKTTPPVLDSDGSFFLYSKLTVDKSRWQQGNVFSCSVLHEALHAHYTRKELSLSP

SEQ ID NO: 373 - protein, 328 aa, Homo sapiens
ASTKGPSVFPLAPSSKSTSGGTAALGCLVKDYFPEPVTVSWNSGALTSGVHTFPAVLQSSGLYSLSSVVTVPSSSLGTQTYICNVNHKPSNTKVDKKVEPKSCDKTHTCPPCPAPEYLGGDSVFLFPPKPKDVLMISRTPEVTCVVVDVSHEDPEVKFNWYVDGVEVHNAKTKPREEQYNSTYRVVSVLPVLHRDWLNGKEYKCKVSNKALPKPIEKTISKAKGQPREPQVYTLPPSREEMTKNQVSLTCLVKGFYPSDIAVEWESNGQPENNYKTTPPVLDSDGSFFLYSKLTVKKSRWQQGNVFSCSVLHEALHAHYTRKELSLSP

SEQ ID NO: 374 - protein, 328 aa, Homo sapiens
ASTKGPSVFPLAPSSKSTSGGTAALGCLVKDYFPEPVTVSWNSGALTSGVHTFPAVLQSSGLYSLSSVVTVPSSSLGTQTYICNVNHKPSNTKVDKKVEPKSCDKTHTCPPCPAPEYLGGDSVFLFPPKPKDVLMISRTPEVTCVVVDVAHEDPEVKFNWYVDGVEVHNAKTKPREEQYNSTYRVVSVLPVLHRDWLNGKEYKCKVSNKALPKPIEKTISKAKGQRREPQVYTLPPSREEMTKNQVSLTCLVKGFYPSDIAVEWESNGQPENNYKTTPPVLDSDGSFFLYSKLTVDKSRWQQGNVFSCSVLHEALHAHYTRKELSLSP

SEQ ID NO: 375 - protein, 328 aa, Homo sapiens
ASTKGPSVFPLAPSSKSTSGGTAALGCLVKDYFPEPVTVSWNSGALTSGVHTFPAVLQSSGLYSLSSVVTVPSSSLGTQTYICNVNHKPSNTKVDKKVEPKSCDKTHTCPPCPAPEYLGGDSVFLFPPKPKDVLMISRTPEVTCVVVDVAHEDPEVKFNWYVDGVEVHNAKTKPREEQYNSTYRVVSVLPVLHRDWLNGKEYKCKVSNKALPKPIEKTISKAKGQPREPQVYTLPPSREEMTKNQVSLTCLVKGFYPSDIAVEWESNGQPENNYKTTPPVLDSDGSFFLYSKLTVKKSRWQQGNVFSCSVLHEALHAHYTRKELSLSP

SEQ ID NO: 376 - protein, 328 aa, Homo sapiens
ASTKGPSVFPLAPSSKSTSGGTAALGCLVKDYFPEPVTVSWNSGALTSGVHTFPAVLQSSGLYSLSSVVTVPSSSLGTQTYICNVNHKPSNTKVDKKVEPKSCDKTHTCPPCPAPELLGGDSVFLFPPKPKDVLMISRTPEVTCVVIDVAHEDPEVKFNWYVDGVEVHNAKTKPREEQYNSTYRVVSVLPVLHRDWLNGKEYKCKVSNKALPKPIEKTISKAKGQRREPQVYTLPPSREEMTKNQVSLTCLVKGFYPSDIAVEWESNGQPENNYKTTPPVLDSDGSFFLYSKLTVDKSRWQQGNVFSCSVLHEALHAHYTRKELSLSP

SEQ ID NO: 377 - protein, 328 aa, Homo sapiens
ASTKGPSVFPLAPSSKSTSGGTAALGCLVKDYFPEPVTVSWNSGALTSGVHTFPAVLQSSGLYSLSSVVTVPSSSLGTQTYICNVNHKPSNTKVDKKVEPKSCDKTHTCPPCPAPELLGGDSVFLFPPKPKDVLMISRTPEVTCVVIDVAHEDPEVKFNWYVDGVEVHNAKTKPREEQYNSTYRVVSVLPVLHRDWLNGKEYKCKVSNKALPKPIEKTISKAKGQPREPQVYTLPPSREEMTKNQVSLTCLVKGFYPSDIAVEWESNGQPENNYKTTPPVLDSDGSFFLYSKLTVKKSRWQQGNVFSCSVLHEALHAHYTRKELSLSP

SEQ ID NO: 378 - protein, 328 aa, Homo sapiens
ASTKGPSVFPLAPSSKSTSGGTAALGCLVKDYFPEPVTVSWNSGALTSGVHTFPAVLQSSGLYSLSSVVTVPSSSLGTQTYICNVNHKPSNTKVDKKVEPKSCDKTHTCPPCPAPEYLGGDSVFLFPPKPKDVLMISRTPEVTCVVIDVSHEDPEVKFNWYVDGVEVHNAKTKPREEQYNSTYRVVSVLPVLHRDWLNGKEYKCKVSNKALPKPIEKTISKAKGQRREPQVYTLPPSREEMTKNQVSLTCLVKGFYPSDIAVEWESNGQPENNYKTTPPVLDSDGSFFLYSKLTVDKSRWQQGNVFSCSVLHEALHAHYTRKELSLSP

SEQ ID NO: 379 - protein, 328 aa, Homo sapiens
ASTKGPSVFPLAPSSKSTSGGTAALGCLVKDYFPEPVTVSWNSGALTSGVHTFPAVLQSSGLYSLSSVVTVPSSSLGTQTYICNVNHKPSNTKVDKKVEPKSCDKTHTCPPCPAPEYLGGDSVFLFPPKPKDVLMISRTPEVTCVVIDVSHEDPEVKFNWYVDGVEVHNAKTKPREEQYNSTYRVVSVLPVLHRDWLNGKEYKCKVSNKALPKPIEKTISKAKGQPREPQVYTLPPSREEMTKNQVSLTCLVKGFYPSDIAVEWESNGQPENNYKTTPPVLDSDGSFFLYSKLTVKKSRWQQGNVFSCSVLHEALHAHYTRKELSLSP

SEQ ID NO: 380 - protein, 328 aa, Homo sapiens
ASTKGPSVFPLAPSSKSTSGGTAALGCLVKDYFPEPVTVSWNSGALTSGVHTFPAVLQSSGLYSLSSVVTVPSSSLGTQTYICNVNHKPSNTKVDKKVEPKSCDKTHTCPPCPAPEYLGGDSVFLFPPKPKDVLMISRTPEVTCVVIDVAHEDPEVKFNWYVDGVEVHNAKTKPREEQYNSTYRVVSVLPVLHRDWLNGKEYKCKVSNKALPKPIEKTISKAKGQRREPQVYTLPPSREEMTKNQVSLTCLVKGFYPSDIAVEWESNGQPENNYKTTPPVLDSDGSFFLYSKLTVDKSRWQQGNVFSCSVLHEALHAHYTRKELSLSP

SEQ ID NO: 381 - protein, 328 aa, Homo sapiens
ASTKGPSVFPLAPSSKSTSGGTAALGCLVKDYFPEPVTVSWNSGALTSGVHTFPAVLQSSGLYSLSSVVTVPSSSLGTQTYICNVNHKPSNTKVDKKVEPKSCDKTHTCPPCPAPEYLGGDSVFLFPPKPKDVLMISRTPEVTCVVIDVAHEDPEVKFNWYVDGVEVHNAKTKPREEQYNSTYRVVSVLPVLHRDWLNGKEYKCKVSNKALPKPIEKTISKAKGQPREPQVYTLPPSREEMTKNQVSLTCLVKGFYPSDIAVEWESNGQPENNYKTTPPVLDSDGSFFLYSKLTVKKSRWQQGNVFSCSVLHEALHAHYTRKELSLSP
